(19) United States
(12) Patent Application Publication
(10) Pub. No.: US 2004/0132977 A1
(43) Pub. Date: Jul. 8, 2004

(54) Rational evolution of cytokines for higher stability, the cytokines and encoding nucleic acid molecules

(76) Inventors: Rene Gantier, Elancourt (FR); Manuel Vega, Vigneux-sur-Seine (FR); Lila Drittanti, Vigneux-sur-Seine (FR); Thierry Guyon, Palaiseau (FR)

Correspondence Address: Stephanie L. Seidman, Fish & Richardson P.C., 12390 El Camino Real, San Diego, CA, 92130-2081, US

(21) Appl. No.: 10/658,834

(22) Filed: Sep. 8, 2003

Related U.S. Application Data
(60) Provisional application No. 60/457,135, filed on Mar. 21, 2003.
(60) Provisional application No. 60/409,898, filed on Sep. 9, 2002.

(51) Int. Cl. C07K 14/52; C07K 14/54

(52) U.S. Cl. 530/351

(57) ABSTRACT

Processes and systems for the high throughput directed evolution of peptides and proteins, particularly cytokines that act in complex biological settings, are provided. Also provided is a rational method for generating protein variants and the resulting variants.

### RELATED APPLICATIONS

[0001] Benefit of priority to under 37 C.F.R. §1.119(e) to U.S. provisional application Serial No. 60/457,135, entitled “RATIONAL EVOLUTION OF CYTOKINES FOR HIGHER STABILITY, ENCODING NUCLEIC ACID MOLECULES AND RELATED APPLICATIONS,” filed Mar. 21, 2003, and to U.S. provisional application Serial No. 60/409,898, entitled “RATIONAL EVOLUTION OF CYTOKINES FOR HIGHER STABILITY, ENCODING NUCLEIC ACID MOLECULES AND RELATED APPLICATIONS,” filed Sep. 9, 2002, each to Rene Gantier, Thierry Guyon, Manuel Vega and Lila Drittanti is claimed.

[0002] This application is related to U.S. application Ser. No. attorney dkt. no. 37851-922PC, entitled, “RATIONAL EVOLUTION OF CYTOKINES FOR HIGHER STABILITY, THE CYTOKINES AND ENCODING NUCLEIC ACID MOLECULES,” to Rene Gantier, Thierry Guyon, Manuel Vega and Lila Drittanti. This application also is related to U.S. application Ser. No. Attorney docket no. 37851-923, filed the same day herewith, entitled “RATIONAL DIRECTED PROTEIN EVOLUTION USING TWO-DIMENSIONAL RATIONAL MUTAGENESIS SCANNING,” to U.S. provisional application Serial No. 60/457,063, entitled “RATIONAL DIRECTED PROTEIN EVOLUTION USING TWO-DIMENSIONAL RATIONAL MUTAGENESIS SCANNING,” filed Mar. 21, 2003, and to U.S. provisional application Serial No. 60/410,258, entitled “RATIONAL DIRECTED PROTEIN EVOLUTION USING TWO-DIMENSIONAL RATIONAL MUTAGENESIS SCANNING,” filed Sep. 9, 2002, each to Rene Gantier, Thierry Guyon, Hugo Cruz Ramos, Manuel Vega and Lila Drittanti. This application also is related to co-pending U.S. application Ser. No. 10/022,249, filed Dec. 17, 2001, entitled “HIGH THROUGHPUT DIRECTED EVOLUTION BY RATIONAL MUTAGENESIS,” to Manuel Vega and Lila Drittanti.

[0003] The subject matter of each of the above-noted applications and provisional applications is incorporated by reference in its entirety.

### FIELD OF INVENTION

[0004] Modified cytokine proteins having selected modified properties compared to the unmodified or wild type proteins, and nucleic acid molecules encoding these proteins are provided. The proteins can be used for treatment and diagnosis.

### BACKGROUND

[0005] The delivery of therapeutic proteins for clinical use is a major challenge to pharmaceutical science. Once in the blood stream, these proteins are constantly eliminated from circulation within a short time by different physiological processes, involving metabolism as well as clearance using normal pathways for protein elimination, such as (glomerular) filtration in the kidneys or proteolysis in blood. The latter is often the limiting process affecting the half-life of proteins used as therapeutic agents in per-oral administration and either intravenous or intramuscular injection. The problems associated with these routes of administration of proteins are well known and various strategies have been used in attempts to solve them.

[0006] A protein family, which has been the focus of much clinical work, and efforts to improve its administration and bio-assimilation, is the cytokine family, including the interferon family. Interferon molecules are grouped in the heterogeneous family of cytokines, originally identified on the basis of their ability to induce cellular resistance to viral infections (Diaz et al., J. Interferon Cytokine Res., 16:179-180, 1996). Type I interferons, referred to as interferons α/β, include many members of the interferon α family (interferon α1, α2, ω and τ) as well as interferon β. The type II interferon y is different from type I in its particular mechanisms that regulate its production. Whereas the production of interferons α/β is most efficiently induced in many types of cells upon viral infection, interferon-y is produced mainly in cells of hemopoietic system, such as T-cells or natural killer cells, upon stimulation by antigens or cytokines, respectively. These two interferon systems are functionally non-redundant in the antiviral defense host.

[0007] Interferon α, hereinafter “interferon alpha-2b,” or “interferon α-2b” or “IFNα-2b,” used interchangeably, has a broad spectrum of biological effects, including antiviral effects. Antiviral effects include antiproliferative and immuno-modulatory actions (Stark et al., Annu. Rev. Biochem., 67:227-264, 1998). As well as eliciting strong antiviral activities in target cells, interferons α/β also activate effector cells of the innate immune system such as natural killer cells and macrophages (Pestka et al., Annu. Rev. Biochem., 56:727-777, 1987; Biron et al., Annu. Rev. Immunol., 17:189-220, 1999). As part of its immunomodulatory action, interferon type I protects T-lymphocytes from apoptosis (Scheel-Toeller et al., Eur. J. Immunol., 29:2603-2612, 1999; Marrack et al., J. Exp. Med., 189:521-530, 1999) and growth enhancing factors (Robert et al., Hematol. Oncol, 4:113-120, 1986; Morikawa et al., J. Immunol., 139:761-766, 1987). The biological effects of interferons α/β are initiated upon binding to the IFN type I receptor, which results in activation of several downstream effector molecules (Hibbert and Foster, J. Interferon Cytokine Res., 19:309-318, 1999).

[0008] Interferons as well as many cytokines are important therapeutics. Since naturally occurring variants have not evolved as therapeutics, they often have undesirable side-effects as well as the above-noted problems of short-half life, administration and bioavailability. Hence, there is a need to improve properties of cytokines, including interferons, for use as therapeutic agents. Therefore, among the objects herein, it is an object to provide cytokines that have improved therapeutic properties.

### SUMMARY

[0009] Provided herein are methods for directed evolution of families of proteins and resulting families of modified proteins. A family, such as the cytokine protein family, is initially identified. A property or phenotype for modification, such as resistance to proteolysis for increased stability in blood, is selected for modification. A representative member or members of the family, such as members of the interfero α family, such as IFNα-2b or IFNα-2a, or interferon β family, is (are) selected. It is modified using any directed evolution method and protein(s) with a desired phenotype are screened and identified. In addition, the 3-dimensional structure of the protein can be mapped to topologically and spatially identify the loci that are modified to achieve the phenotypic change. 3-dimensional structures of other members of the family are generated or obtained and compared with the modified family member. Loci in the other family members that correspond on the protein to those modified in the original protein are identified and modified. The resulting proteins can be tested to confirm that they exhibit the modified phenotype.

[0010] Provided herein are methods for generating modified cytokines based on structural homology (3D scanning). These methods are based on the spatial and topological structure; they are not based on their underlying sequences of amino acid residues. The methods are used for identification of target sites for mutagenesis, particularly in families of target proteins. The targets are identified through comparison of patterns of protein backbone folding between and among structurally related proteins. The methods are exemplifed herein for cytokines. Families of the modified cytokines also are provided herein.

[0011] Any protein known or otherwise available to those of skill in the art is suitable for modification, such as optimization or improvement of a selected property, using the directed evolution methods provided herein, including cytokines (e.g., IFNα, including IFNα-2b and IFNα-2a, and IFNβ) or any other proteins that have already been mutated or optimized.

[0012] Provided herein are modified cytokines that exhibit increased resistance to proteolysis as assessed in vivo or in vitro. Typically the increase in resistance is a least 5%, generally 8%, 10% or more. The modified cytokines provided herein include those designed by 3D scanning using the interferon α's that were modified based upon 2D scanning methods herein.

[0013] Also provided herein are modified (mutant) cytokine proteins, such as variants of IFNβ and IFNα, including IFNα-2b and IFNα-2a proteins and IFNβ proteins, that have altered, particularly, improved therapeutic properties, including higher stability compared to the unmodified forms.

[0014] In particular, exemplary modified cytokines provided herein have increased stability, which, for example, improves their use as therapeutics. Among the modified cytokines provided herein are those that exhibits increased resistance to proteolysis compared to the unmodified cytokine. In particular, such resistance is at least 10%, 20%, 30%, 40%, 50%, 70%, 100% or more resistant to proteolysis compared to the unmodified cytokine. Also provided are cytokines that have increased anti-proliferative and/or antiviral activity and/or resistance to proteolysis compared to an unmodified cytokine.

[0015] Exemplary of the modified cytokines provided herein are modified interferons that exhibit higher stability compared to unmodified forms.

[0016] Such modified interferons can be used for treating conditions in humans that are responsive to treatment with interferons, such, but are not limited to, as viral infections, cancer or tumors, undesired cell proliferation and for immuno-modulation.

[0017] Exemplary of proteins that can be modified by the 2D and 3D scanning methods provided herein are cytokines from the interferons/interleukin-10 family. This family includes, for example, interleukin-10 (IL-10; SEQ ID NO:200, interferon beta (IFNβ; SEQ ID NO: 196), interferon alpha-2a (IFNα-2a; SEQ ID NO: 182), interferon alpha-2b (IFNα-2b; SEQ ID NO:1), and interferon gamma (IFN-y; SEQ ID NO: 199). The long-chain cytokine protein family includes, among others, granulocyte colony stimulating factor (G-CSF; SEQ ID NO: 210), leukemia inhibitory factor (LIF; SEQ ID NO: 213), growth hormone (hGH; SEQ ID NO: 216), ciliary neurotrophic factor (CNTF; SEQ ID NO: 212), leptin (SEQ ID NO: 211), oncostatin M (SEQ ID NO: 214), interleukin-6 (IL-6; SEQ ID NO: 217) and interleukin-12 (IL-12; SEQ ID NO: 215). The short-chain cytokine protein family includes, among others, erythropoietin (EPO; SEQ ID NO: 201), granulocyte-macrophage colony stimulating factor (GM-CSF; SEQ ID NO: 202), interleukin-2 (IL-2; SEQ ID NO: 204), interleukin-3 (IL-3; SEQ ID NO: 205), interleukin-4 (IL-4; SEQ ID NO: 207), interleukin-5 (IL-5; SEQ ID NO: 208), interleukin-13 (IL-13; SEQ ID NO: 209), Flt3 ligand (SEQ ID NO: 203) and stem cell factor (SCF; SEQ ID NO: 206). Modified forms of each that have increased resistance to proteolysis are provided. They were generated by comparison among the 3D-structures to identify residues that improve resistance to proteolysis. Pharmaceutical compositions containing each modified cytokine and uses and methods of treatment are provided.

[0018] The modified cytokines have use as therapeutics. Each cytokine has improved biological and or therapeutic activity, compared to the know activity of the unmodified cytokine. Accordingly, uses of the cytokines for treatment of cytokine-mediated diseases and diseases for which immunotherapy is employed are provided. Methods of treatment using the modified cytokines for diseases also are provided. Each cytokine has a known therapeutic use, and such use is contemplated herein. Cyokines provided herein have improved properties, such as increased bioavailability, improved stability, particularly in vivo, and/or greater efficacy.

### DESCRIPTION OF THE FIGURES

[0019] FIG. 1(A) displays the sequence of the mature IFNα-2b. Residues targeted by a mixture of proteases, including α-chymotrypsin (F, L, M, W, and Y), endoproteinase Arg-C (R), endoproteinase Asp-N (D), endoproteinase Glu-C (E), endoproteinase Lys-C (K), and trypsin (K, and R), are underlined and in bold lettering

[0020] FIG. 1(B) displays the structure of IFNα-2b obtained from the NMR structure of IFNα-2a (PDB code 1ITF) in ribbon representation. Surface residues exposed to the action of the proteases considered in FIG. 1A are in space filling representation.

[0021] FIG. 2 depicts the “Percent Accepted Mutation” (PAM250) matrix Values given to identical residues are shown in gray squares. Highest values in the matrix are shown in black squares and correspond to the highest occurrence of substitution between two residues.

[0022] FIG. 3 presents the scores obtained from PAM250 analysis for the amino acid substitutions (replacing amino acids on the vertical axis; amino acid position on the horizontal axis) aimed at introducing resistance to proteolysis into the IFNα-2b at the protease target sequences. The two best replacing residues for each target amino acid according to the highest substitution scores are shown in black rectangles.

[0023] FIGS. 4(A)-4(C) provide graphs of experiments indicating the levels of protection against in vitro proteolysis for IFNα-2b variants produced in mammalian cells. In FIGS. 4(B) and 4(C), the vertical axis indicates the relative level of non-proteolized protein and the horizontal axis indicates time in hours.

[0024] FIG. 5 displays the characterization of several IFNα-2b variants, produced in mammalian cells, treated with α-chymotrypsin.

[0025] FIG. 6(A) shows the characterization of the E113H IFNα-2b variant when treated with α-chymotrypsin. The percent of residual (anti-viral) activity for the variant (black line and white circles) after treatment with α-chymotrypsin was compared to the treated wild-type IFNα-2b (dashed line and black squares). For this experiment, the E113H IFNα-2b variant was produced in mammalian cells.

[0026] FIG. 6(B) shows the characterization of the E113H IFNα-2b variant treated with a mixture of proteases. The percent of residual (anti-viral) activity for the variant (black line and white circles) after treatment with protease mixture was compared to the treated wild-type IFNα-2b (dashed line and black squares). For this experiment, the E113H IFNα-2b variant was produced in mammalian cells.

[0027] FIG. 6(C) presents the characterization of the E113H IFNα-2b variant treated with blood lysate. The percent of residual (anti-viral) activity for the variant (black line and white circles) after treatment with blood lysate was compared to the treated wild-type IFNα-2b (dashed line and black squares). For this experiment, the E113H IFNα-2b variant was produced in mammalian cells.

[0028] FIG. 6(D) presents the characterization of the E113H IFNα-2b variant treated with serum. The percent of residual (anti-viral) activity for the variant (black line and white circles) after treatment with serum was compared to the treated wild-type IFNα-2b (dashed line and black squares). For this experiment, the E113H IFNα-2b variant was produced in mammalian cells.

[0029] FIGS. 6(E) and 6(F) provide graphs indicating the levels of protection against in vitro proteolysis for IFNα-2b variants produced in bacteria. In FIGS. 6(E) and 6(F), the vertical axis indicates the relative level of non-proteolized protein and the horizontal axis indicates time in hours. The percent of residual (anti-viral) activity for the variants (gray circles with continuous lines) after treatment were compared to the treated wild-type IFNα-2b (solid circles with dashed lines).

[0030] FIG. 6(G) provides graphs indicating the in vitro potency for antiviral activity, for IFNα-2b variants produced in bacteria. The vertical axis indicates the level of antiviral activity and the horizontal axis indicates concentration of the variants at which each level of activity is achieved. The activity for the variants (continous line with gray circles) was compared to that of the wild-type IFNα-2b (black triangles with dashed lines). The potency for each variant was calculated from the graphs as the concentration at the inflection point of the respective curves. FIG. 6(T) shows the value of potency obtained for each variant tested compared to the wild type IFNα.

[0031] FIG. 6(H) provides the in vitro potency for anti-proliferation activity, for IFNα-2b variants produced in bacteria. The activity for the variants was compared to that of the wild-type IFNα-2b in serial dilution experiments where the anti-proliferation activity was measured for a number of dilutions for each variant. Potency was calculated from the graphs as the concentration at the inflection point of the respective curves. The figure shows the value of potency obtained for each variant tested and in comparison to the wild type IFNα.

[0032] FIGS. 6(I) to 6(N) provide graphs indicating the pharmacokinetics in mice following subcutaneous injection of IFNα-2b variants produced in bacteria. The vertical axis indicates the level of antiviral activity in blood and the horizontal axis indicates the time after injection at which the level of antiviral activity is determined. The pharmacokinetics of the variants (in gray solid circles with gray continuous lines) was compared to that of the wild-type IFNα-2b (in black with dashed lines) and of a pegylated derivative (Pegasys, Roche) (36 μg/ml open triangles with continuous black lines; and 18 μg/ml open circles with continuous black lines); and vehicle (gray solid triangles with continous gray lines. The Area Under the Curve (AUC) for each variant was calculated from the graphs and is shown in 6(U).

[0033] FIG. 6(O) provides graphs indicating the levels of protection against in vitro proteolysis for IFNβ variants produced in mammalian cells.

[0034] FIG. 6(N), the vertical axis indicates the relative level of non-proteolized protein and the horizontal axis indicates time in hours. The percent of residual (anti-viral) activity for the variants after treatment were compared to the treated wild-type IFNβ.

[0035] FIGS. 6(P) to 6(S) provide graphs indicating the in vitro potency for either antiviral activity (6(P) and 6(Q)) or anti-proliferative activity (6(R) and 6(S), for a number of IFNβ variants produced in mammalian cells. The vertical axis indicates the level of (antiviral or anti-proliferation) activity and the horizontal axis indicates the concentration of the variants at which each level of activity is achieved. The activity for the variants (6(Q) and (6(S)) was compared to that of the wild-type IFNβ (6(P) and (6(R)). The activity obtained with either no previous treatment or by treating the variants with proteases prior to the activity test is shown.

[0036] FIG. 6(T) provides a comparison of antiviral activity (potency), anti-proliferation activity (potency), number of mutations present and AUC (from PK) for a number of IFNα-2b and in comparison with the wild-type IFNα-2b.

[0037] FIG. 6(U) provides IFN units injected and protein injected (μg/ml) for the data in FIG. 6(T).

[0038] FIG. 7(A) depicts a top view ribbon representation of IFNα-2b structure obtained from the NMR structure of IFNα-2a (PDB code 1ITF). Residues represented in “space filling” define (1) the “receptor binding region” based on either our “alanine scanning” analysis or on studies by Piehler et al., J. Biol. Chem., 275:40425-40433, 2000, and Roisman et al., Proc. Natl. Acad. Sci. USA, 98:13231-13236, 2001 (in light-gray and dark-gray, respectively), and (2) replacing residues (LEADs) for resistance to proteolysis (in black).

[0039] FIG. 7(B) depicts a side view ribbon representation of IFNα-2b structure (PDB code 1ITF). Residue representation is as in FIG. 7A.

[0040] FIG. 8(A) schematizes the identification of homologous amino acid positions between a number of cytokines and the LEAD mutants of IFNα-2b using 3-dimensional scanning (also referred to herein as based on “structure-based homology” methods or “structural homology” methods).

[0041] FIG. 8(B) illustrates a structural overlapping between human interferon α-2b obtained from the NMR structure of IFNα-2a (PDB code 1ITF) and human interferon β (PDB code 1AU1) using Swiss Pdb Viewer.

[0042] FIG. 8(C) illustrates a structural overlapping between human interferon α-2b obtained from the NMR structure of IFNα-2a (PDB code 1ITF) and erythropoietin (PDB code 1BUY) using Swiss Pdb Viewer.

[0043] FIG. 8(D) illustrates a structural overlapping between human interferon α-2b obtained from the NMR structure of IFNα-2a (PDB code 1ITF) and granulocyte-colony stimulating factor (PDB code 1CD9) using Swiss Pdb Viewer.

[0044] FIG. 9 illustrates a structural alignment of a number of cytokines and interferon α-2b sequences. Bold underlined residues define the region on each cytokine sequence that based on structural homology comparison corresponds to the structurally-related mutations found on the LEADs for protease resistance of IFNα-2b.

[0045] FIG. 10(A) shows the antiviral activity of interferon α-2b mutants generated by alanine-scanning analysis used for protein redesign. Plotted symbols for wild type and variants of interferon α-2b are indicated in the inset.

[0046] FIG. 10(B) displays cell proliferation after treatment with interferon α-2b mutants obtained by alanine-scanning analysis. Plotted symbols for wild type and variants of interferon α-2b are indicated in the inset.

[0047] FIG. 10(C) displays the correlation between the antiviral activity and cell proliferation activity of interferon α-2b mutants obtained by alanine-scanning analysis.

[0048] FIG. 11 Candidate glycosylation sites for interferon α-2b stabilization and redesign thereof.

[0049] FIG. 12(A) shows the is-HIT residue positions and type of replacing amino acids selected to generate modified protein sequences of interferon β (corresponding to SEQ ID Nos: 233-289), based on 3D-scanning (structural homology method), including PAM250 analysis.

[0050] FIG. 12(B) displays the is-HIT residue positions and type of replacing amino acids selected to generate modified protein sequences of interferon gamma (corresponding to SEQ ID Nos: 290-311), based on structural homology and PAM250 analysis.

[0051] FIG. 12(C) shows the is-HIT residue positions and type of replacing amino acids selected to generate modified protein sequences of interleukin-10 (corresponding to SEQ ID Nos: 312-361), based on structural homology and PAM250 analysis.

[0052] FIG. 12(D) displays the is-HIT residue positions and type of replacing amino acids selected to generate modified protein sequences of ciliary neurotrophic factor (corresponding to SEQ ID Nos: 684-728), based on structural homology and PAM250 analysis.

[0053] FIG. 12(E) shows the is-HIT residue positions and type of replacing amino acids selected to generate modified protein sequences of granulocyte-colony stimulating factor (corresponding to SEQ ID Nos: 631-662), based on structural homology and PAM250 analysis.

[0054] FIG. 12(F) displays the is-HIT residue positions and type of replacing amino acids selected to generate modified protein sequences of human growth hormone (corresponding to SEQ ID Nos: 850-895), based on structural homology and PAM250 analysis.

[0055] FIG. 12(G) shows the is-HIT residue positions and type of replacing amino acids selected to generate modified protein sequences of interleukin-12 (corresponding to SEQ ID Nos: 794-849), based on structural homology and PAM250 analysis.

[0056] FIG. 12(H) displays the is-HIT residue positions and type of replacing amino acids selected to generate modified protein sequences of interleukin-6 (corresponding to SEQ ID Nos: 896-939), based on structural homology and PAM250 analysis.

[0057] FIG. 12(I) shows the is-HIT residue positions and type of replacing amino acids selected to generate modified protein sequences of leptin (corresponding to SEQ ID Nos: 663-683), based on structural homology and PAM250 analysis.

[0058] FIG. 12(J) displays the is-HIT residue positions and type of replacing amino acids selected to generate modified protein sequences of leukemia inhibitory factor (corresponding to SEQ ID Nos: 729-760), based on structural homology and PAM250 analysis.

[0059] FIG. 12(K) shows the is-HIT residue positions and type of replacing amino acids selected to generate modified protein sequences of oncostatin M (corresponding to SEQ ID Nos: 761-793), based on structural homology and PAM250 analysis.

[0060] FIG. 12(L) displays the is-HIT residue positions and type of replacing amino acids selected to generate modified protein sequences of erythropoietin (corresponding to SEQ ID Nos: 940-977), based on structural homology and PAM250 analysis.

[0061] FIG. 12(M) shows the is-HIT residue positions and type of replacing amino acids selected to generate modified protein sequences of Flt3 ligand (corresponding to SEQ ID Nos: 401-428), based on structural homology and PAM250 analysis.

[0062] FIG. 12(N) displays the is-HIT residue positions and type of replacing amino acids selected to generate modified protein sequences of granulocyte-macrophage colony-stimulating factor (corresponding to SEQ ID Nos: 362-400), based on structural homology and PAM250 analysis.

[0063] FIG. 12(O) shows the is-HIT residue positions and type of replacing amino acids selected to generate modified protein sequences of interleukin-13 (corresponding to SEQ ID Nos: 603-630), based on structural homology and PAM250 analysis.

[0064] FIG. 12(P) displays the is-HIT residue positions and type of replacing amino acids selected to generate modified protein sequences of interleukin-2 (corresponding to SEQ ID Nos: 429-476), based on structural homology and PAM250 analysis.

[0065] FIG. 12(Q) shows the is-HIT residue positions and type of replacing amino acids selected to generate modified protein sequences of interleukin-3 (corresponding to SEQ ID Nos: 477-498), based on structural homology and PAM250 analysis.

[0066] FIG. 12(R) displays the is-HIT residue positions and type of replacing amino acids selected to generate modified protein sequences of interleukin-4 (corresponding to SEQ ID Nos: 543-567), based on structural homology and PAM250 analysis.

[0067] FIG. 12(S) shows the is-HIT residue positions and type of replacing amino acids selected to generate modified protein sequences of interleukin-5 (corresponding to SEQ ID Nos: 568-602), based on structural homology and PAM250 analysis.

[0068] FIG. 12(T) displays the is-HIT residue positions and type of replacing amino acids selected to generate modified protein sequences of stem cell factor (corresponding to SEQ ID Nos: 499-542), based on structural homology and PAM250 analysis.

### DETAILED DESCRIPTION

[0069] Outline

[0070] A. Definitions

[0071] B. Directed Evolution

[0072] 1) Pure Random Mutagenesis

[0073] 2) Restricted Random Mutagenesis

[0074] 3) Non-restricted Rational mutagenesis

[0075] C. 2-Dimensional Rational Scanning (2D scanning)

[0076] 1) Identifying In-silico HITS

[0077] 2) Identifying Replacing Amino Acids

[0078] (a) Percent Accepted Mutation (PAM)

[0079] (i) PAM Analysis

[0080] (ii) PAM250

[0081] (b) Jones and Gonnet

[0082] (c) Fitch and Feng

[0083] (d) McLachlan, Grantham and Miyata

[0084] (e) Rao

[0085] (f) Risler

[0086] (g) Johnson

[0087] (h) Block Substitution Matrix (BLOSUM) p2 3) Physical Construction of Mutant Proteins and Biological Assays

[0088] D. 2-Dimensional Scanning of Proteins for Increased Resistance to Proteolysis

[0089] E. Rational Evolution of IFNα-2b For Increased Resistance to Proteolysis

[0090] 1) Modified IFNα-2b and IFNα-2a Proteins with Single Amino Acid Substitutions (is-HITs)

[0091] 2) LEAD identification

[0092] 3) N-glycosylation Site Addition

[0093] F. Protein Redesign

[0094] G. 3D-scanning and Its Use for Modifying Cytokines

[0095] 1) Homology

[0096] 2) 3D-scanning (Structural Homology)

[0097] 3) Application of the 3D-scanning method to Cytokines

[0098] (a) Structurally Homologous Interferon Mutants

[0099] (b) Structurally Homologous Cytokine Mutants

[0100] H. Rational Evolution of IFNβ For Increased Resistance to Proteolysis Modified IFNβ Proteins with Single Amino Acid Substitutions

[0101] I. Super-LEADs and Additive Directional Mutagenesis (ADM).

[0102] 1) Additive Directional Mutagenesis

[0103] 2) Multi-overlapped Primer Extensions

[0104] J. Uses of the Mutant IFNα, IFNβ-2b Genes and Cytokines in Therapeutic Methods

[0105] 1) Fusion Proteins

[0106] 2) Nucleic Acid Molecules for Expression

[0107] 3) Formulation of Optimized Cytokines

[0108] K. Examples

[0109] A. Definitions

[0110] Unless defined otherwise, all technical and scientific terms used herein have the same meaning as is commonly understood by one of skill in the art to which the invention(s) belong. All patents, patent applications, published applications and publications, Genbank sequences, websites and other published materials referred to throughout the entire disclosure herein, unless noted otherwise, are incorporated by reference in their entirety. In the event that there is a plurality of definitions for terms herein, those in this section prevail. Where reference is made to a URL or other such identifier or address, it understood that such identifiers can change and particular information on the internet can come and go, but equivalent information can be found by searching the internet. Reference thereto evidences the availability and public dissemination of such information.

[0111] As used herein, biological activity of a protein refers to any activity manifested by the protein in vivo.

[0112] As used herein, “a directed evolution method” refers to methods that “adapt” either natural proteins, synthetic proteins or protein domains to work in new or existing natural or artificial chemical or biological environments and/or to elicit new functions and/or to increase or decrease a given activity, and/or to modulate a given feature. Exemplary directed evolution methods include pure random mutageneis methods; restricted random mutagenesis methods; and non-restricted rational mutagenesis methods, such as the rational directed evolution method described in co-pending U.S. application Ser. No. 10/022,249; and the 2-dimensional rational scanning method provided herein.

[0113] As used herein, two dimensional rational mutagenesis scanning (2D scanning) refers to the processes provided herein in which two dimensions of a particular protein sequence are scanned: (1) one dimension is to identify specific amino acid residues along the protein sequence to replace with different amino acids, referred to as is-HIT target positions, and (2) the second dimension is the amino acid type selected for replacing the particular is-HIT target, referred to as the replacing amino acid.

[0114] As used herein, in silico refers to research and experiments performed using a computer. In silico methods include, but are not limited to, molecular modeling studies, and biomolecular docking experiments.

[0115] As used herein, “is-HIT” refers to an in silico identified amino acid position along a target protein sequence that has been identified based on i) the particular protein properties to be evolved, ii) the protein's amino acid sequence, and/or iii) the known properties of the individual amino acids. These is-HIT loci on the protein sequence are identified without use of experimental biological methods. For example, once the protein feature(s) to be optimized is (are) selected, diverse sources of information or previous knowledge (i.e., protein primary, secondary or tertiary structures, literature, patents) are exploited to determine those amino acid positions that may be amenable to improved protein fitness by replacement with a different amino acid. This step utilizes protein analysis “in silico.” All possible candidate amino acid positions along a target proteins primary sequence that might be involved in the feature being evolved are referred to herein as “in silico HITs” (“is-HITs”). The collection (library), of all is-HITs identified during this step represents the first dimension (target residue position) of the two-dimensional scanning methods provided herein.

[0116] As used herein, “amenable to providing the evolved predetermined property or activity,” in the context of identifying is-HITs, refers to an amino acid position on a protein that is contemplated, based on in silico analysis, to possess properties or features that when replaced would result in the desired activity being evolved. The phrase “amenable to providing the evolved predetermined property or activity,” in the context of identifying replacement amino acids, refers to a particular amino acid type that is contemplated, based on in silico analysis, to possess properties or features that when used to replace the original amino acid in the unmodified starting protein would result in the desired activity being evolved.

[0117] As used herein, high-throughput screening (HTS) refers to processes that test a large number of samples, such as samples of test proteins or cells containing nucleic acids encoding the proteins of interest to identify structures of interest or the identify test compounds that interact with the variant proteins or cells containing them. HTS operations are amenable to automation and are typically computerized to handle sample preparation, assay procedures and the subsequent processing of large volumes of data.

[0118] As used herein, the term “restricted,” when used in the context of the identification of is-HIT amino acid positions along the protein sequence selected for amino acid replacement and/or the identification of replacing amino acids, means that fewer than all amino acids on the protein-backbone are selected for amino acid replacement; and/or fewer than all of the remaining 19 amino acids available to replace the original amino acid present in the unmodified starting protein are selected for replacement. In particular embodiments of the methods provided herein, the is-HIT amino acid positions are restricted, such that fewer than all amino acids on the protein-backbone are selected for amino acid replacement. In other embodiments, the replacing amino acids are restricted, such that fewer than all of the remaining 19 amino acids available to replace the native amino acid present in the unmodified starting protein are selected as replacing amino acids. In a particular embodiment, both of the scans to identify is-HIT amino acid positions and the replacing amino acids are restricted, such that fewer than all amino acids on the protein-backbone are selected for amino acid replacement and fewer than all of the remaining 19 amino acids available to replace the native amino acid are selected for replacement.

[0119] As used herein, “candidate LEADs,” are mutant proteins that are contemplated as potentially having an alteration in any attribute, chemical, physical or biological property in which such alteration is sought. In the methods herein, candidate LEADs are generally generated by systematically replacing is-HITS loci in a protein or a domain thereof with typically a restricted subset, or all, of the remaining 19 amino acids, such as obtained using PAM analysis. Candidate LEADs can be generated by other methods known to those of skill in the art tested by the high throughput methods herein.

[0120] As used herein, “LEADs” are “candidate LEADs” whose activity has been demonstrated to be optimized or improved for the particular attribute, chemical, physical or biological property. For purposes herein a “LEAD” typically has activity with respect to the function of interest that differs by at least 10%, 20%, 30%, 40%, 50%, 60%, 70%, 80%, 90%, 100%, 150%, 200% or more from the unmodified and/or wild type (native) protein. In certain embodiments, the change in activity is at least about 10%, 20%, 30%, 40%, 50%, 60%, 70%, 80%, 90% or 100%, of the activity of the unmodified target protein. In other embodiments, the change in activity is not more than about 10%, 20%, 30%, 40%, 50%, 60%, 70%, 80%, 90% or 100%, of the activity of the unmodified target protein. In yet other embodiments, the change in activity is at least about 2 times, 3 times, 4 times, 5 times, 6 times, 7 times, 8 times, 9 times, 10 times, 20 times, 30 times, 40 times, 50 times, 60 times, 70 times, 80 times, 90 times, 100 times, 200 times, 300 times, 400 times, 500 times, 600 times, 700 times, 800 times, 900 times, 1000 times, or more greater than the activity of the unmodified target protein. The desired alteration, which can be either an increase or a reduction in activity, will depend upon the function or property of interest (e.g., ±10%, ±20%, etc.). The LEADs may be further optimized by replacement of a plurality (2 or more) of “is-HIT” target positions on the same protein molecule to generate “super-LEADs.”

[0121] As used herein, the term “super-LEAD” refers to protein mutants (variants) obtained by combining the single mutations present in two or more of the LEAD molecules into a single protein molecule. Accordingly, in the context of the modified proteins provided herein, the phrase “proteins comprising one or more single amino acid replacements” encompasses any combination of two or more of the mutations described herein for a respective protein. For example, the modified proteins provided herein having one or more single amino acid replacements can have can have any combination of 2, 3, 4, 5, 6, 7, 8, 9, 10, 11, 12, 13, 14, 15, 16, 17, 18, 19, 20 or more of the amino acid replacements at the disclosed replacement positions. The collection of super-LEAD mutant molecules is generated, tested and phenotypically characterized one-by-one in addressable arrays. Super-LEAD mutant molecules are such that each molecule contains a variable number and type of LEAD mutations. Those molecules displaying further improved fitness for the particular feature being evolved, are referred to as super-LEADs. Super-LEADs can be generated by other methods known to those of skill in the art and tested by the high throughput methods herein. For purposes herein a super-LEAD typically has activity with respect to the function of interest that differs from the improved activity of a LEAD by a desired amount, such as at least 10%, 20%, 30%, 40%, 50%, 60%, 70%, 80%, 90%, 100%, 150%, 200% or more from at least one of the LEAD mutants from which it is derived. As with LEADs, the change in the activity for super-LEADs is dependent upon the activity that is being “evolved.” The desired alteration, which can be either an increase or a reduction in activity, will depend upon the function or property of interest.

[0122] As used herein, a recitation that modified protein has more antiviral activity (or other activity) than antiproliferative activity (or another activity) compared to the unmodified cytokine, is comparing the absolute value of the change in each activity compared to wild type.

[0123] As used herein, the phrase “altered loci” refers to the is-HIT amino acid positions in the LEADs or super-LEADs that are replaced with different replacing amino acids, resulting in the desired altered phenotype or activity.

[0124] As used herein, an exposed residue presents more than 15% of its surface exposed to the solvent.

[0125] As used herein, the phrase “structural homology” refers to the degree of coincidence in space between two or more protein backbones.

[0126] Protein backbones that adopt the same protein structure, fold and show similarity upon three-dimensional structural superposition in space can be considered structurally homologous. Structural homology is not based on sequence homology, but rather on three-dimension homology. Two amino acids in two different proteins said to be homologous based on structural homology between those proteins, do not necessarily need to be in sequence-based homologous regions. For example, protein backbones that have a root mean squared (RMS) deviation of less than 3.5, 3.0, 2.5, 2.0, 1.7 or 1.5 angstrom at a given space position or defined region between each other can be considered to be structurally homologous in that region, and are referred to herein as having a “high coincidence” between their backbones. It is contemplated herein that substantially equivalent (e.g., “structurally related”) amino acid positions that are located on two or more different protein sequences that share a certain degree of structural homology will have comparable functional tasks; also referred to herein as “structurally homologous loci.” These two amino acids than can be said to be “structurally similar” or “structurally related” with each other, even if their precise primary linear positions on the amino acid sequences, when these sequences are aligned, do not match with each other. Amino acids that are “structurally related” can be far away from each other in the primary protein sequences, when these sequences are aligned following the rules of classical sequence homology.

[0127] As used herein, a structural homolog is a protein that is generated by structural homology.

[0128] As used herein, the phrase “unmodified target protein,” “unmodified protein” or “unmodified cytokine,” or grammatical variations thereof, refers to a starting protein that is selected for modification using the methods provided herein. The starting unmodified target protein can be the naturally occurring, wild type form of a protein. In addition, the starting unmodified target protein may have previously been altered or mutated, such that it differs from the native wild type isoform, but is nonetheless referred to herein as an starting unmodified target protein relative to the subsequently modified proteins produced herein. Thus, existing proteins known in the art that have previously been modified to have a desired increase or decrease in a particular biological activity compared to an unmodified reference protein can be selected and used herein as the starting “unmodified target protein.” For example, a protein that has been modified from its native form by one or more single amino acid changes and possesses either an increase or decrease in a desired activity, such as resistance to proteolysis, can be utilized with the methods provided herein as the starting unmodified target protein for further modification of either the same or a different biological activity.

[0129] Likewise, existing proteins known in the art that have previously been modified to have a desired increase or decrease in a particular biological activity compared to an unmodified reference protein can be selected and used herein for identification of structurally homologous loci on other structurally homologous target proteins. For example, a protein that has been modified by one or more single amino acid changes and possesses either an increase or decrease in a desired activity, such as resistance to proteolysis, can be utilized with the methods provided herein to identify on structurally homologous target proteins, corresponding structurally homologous loci that can be replaced with suitabale replacing amino acids and tested for either an increase or decrease in the desired biological actiity.

[0130] As used herein, the phrase “only one amino acid replacement occurs on each target protein” refers to the modification of a target protein, such that it differs from the unmodified form of the target protein by a single amino acid change. For example, in one embodiment, mutagenesis is performed by the replacement of a single amino acid residue at only one is-HIT target position on the protein backbone (e.g., “one-by-one” in addressable arrays), such that each individual mutant generated is the single product of each single mutagenesis reaction. The single amino acid replacement mutagenesis reactions are repeated for each of the replacing amino acids selected at each of the is-HIT target positions. Thus, a plurality of mutant protein molecules are produced, whereby each mutant protein contains a single amino acid replacement at only one of the is-HIT target positions.

[0131] As used herein, the phrase “pseudo-wild type,” in the context of single or multiple amino acid replacements, are those amino acids that, while different from the original, such as native, amino acid at a given amino acid position, can replace the native one at that position without introducing any measurable change in a particular protein activity. A population of sets of nucleic acid molecules encoding a collection of mutant molecules is generated and phenotypically characterized such that proteins with amino acid sequences different from the original amino acid, but that still elicit substantially the same level (i.e., at least 10%, 50%, 70%, 90%, 95%, 100%, depending upon the protein) and type of desired activity as the original protein are selected.

[0132] As used herein, biological and pharmacological activity includes any activity of a biological pharmaceutical agent and includes, but is not limited to, resistance to proteolysis, biological efficiency, transduction efficiency, gene/transgene expression, differential gene expression and induction activity, titer, progeny productivity, toxicity, cytotoxicity, immunogenicity, cell proliferation and/or differentiation activity, anti-viral activity, morphogenetic activity, teratogenetic activity, pathogenetic activity, therapeutic activity, tumor suppressor activity, ontogenetic activity, oncogenetic activity, enzymatic activity, pharmacological activity, cell/tissue tropism and delivery.

[0133] As used herein, a “small region” on a polypeptide is relative term depending upon the size of the polypeptide, but typically refers to a region that is less than about 10%, 15%, 25% of the protein. A large region is greater than about 10%, 15% or 25% of the protein.

[0134] As used herein, “output signal” refers to parameters that can be followed over time and, if desired, quantified. For example, when a recombinant protein is introduced into a cell, the cell containing the recombinant protein undergoes a number of changes. Any such change that can be monitored and used to assess the transformation or transfection, is an output signal, and the cell is referred to as a reporter cell; the encoding nucleic acid is referred to as a reporter gene, and the construct that includes the encoding nucleic acid is a reporter construct. Output signals include, but are not limited to, enzyme activity, fluorescence, luminescence, amount of product produced and other such signals. Output signals include expression of a gene or gene product, including heterologous genes (transgenes) inserted into the plasmid virus. Output signals are a function of time (“t”) and are related to the amount of protein used in the composition. For higher concentrations of protein, the output signal can be higher or lower. For any particular concentration, the output signal increases as a function of time until a plateau is reached. Output signals can also measure the interaction between cells, expressing heterologous genes, and biological agents As used herein, the activity of an IFNα-2b or IFNα-2a protein refers to any biological activity that can be assessed. In particular, herein, the activity assessed for the IFNα-2b or IFNα-2a proteins is resistance to proteolysis, antiviral activity and cell proliferation activity.

[0135] As used herein, the Hill equation is a mathematical model that relates the concentration of a drug (i.e., test compound or substance) to the response measured

$$y = \frac{{{y}_{max} [ D ]}^{n}}{{[ D ]}^{n} + {[ {D}_{50} ]}^{n}} ,$$

[0136] where y is the variable measured, such as a response, signal, yₘₐₓ is the maximal response achievable, [D] is the molar concentration of a drug, [D₅₀] is the concentration that produces a 50% maximal response to the drug, n is the slope parameter, which is 1 if the drug binds to a single site and with no cooperativity between or among sites. A Hill plot is log₁₀ of the ratio of ligand-occupied receptor to free receptor vs. log [D] (M). The slope is n, where a slope of greater than 1 indicates cooperativity among binding sites, and a slope of less than 1 can indicate heterogeneity of binding. This general equation has been employed for assessing interactions in complex biological systems (see, published International PCT application No. WO 01/44809 based on PCT No. PCT/FR00/03503, see also, the EXAMPLES).

[0137] As used herein, in the Hill-based analysis (published International PCT application No. WO 01/44809 based on PCT No. PCT/FR00/03503), the parameters, π, κ, τ, ε, η, θ, are as follows:

[0138] π is the potency of the biological agent acting on the assay (cell-based) system;

[0139] κ is the constant of resistance of the assay system to elicit a response to a biological agent;

[0140] ε is the global efficiency of the process or reaction triggered by the biological agent on the assay system;

[0141] τ is the apparent titer of the biological agent;

[0142] θ is the absolute titer of the biological agent; and

[0143] η is the heterogeneity of the biological process or reaction.

[0144] In particular, as used herein, the parameters π (potency) or κ (constant of resistance) are used to respectively assess the potency of a test agent to produce a response in an assay system and the resistance of the assay system to respond to the agent.

[0145] As used herein, ε (efficiency), is the slope at the inflexion point of the Hill curve (or, in general, of any other sigmoidal or linear approximation), to assess the efficiency of the global reaction (the biological agent and the assay system taken together) to elicit the biological or pharmacological response.

[0146] As used herein, τ (apparent titer) is used to measure the limiting dilution or the apparent titer of the biological agent.

[0147] As used herein, θ (absolute titer), is used to measure the absolute limiting dilution or titer of the biological agent.

[0148] As used herein, η (heterogeneity) measures the existence of discontinuous phases along the global reaction, which is reflected by an abrupt change in the value of the Hill coefficient or in the constant of resistance.

[0149] As used herein, a population of sets of nucleic acid molecules encoding a collection (library) of mutants refers to a collection of plasmids or other vehicles that carry (encode) the gene variants, such that individual plasmids or other individual vehicles carry individual gene variants. Each element (member) of the collection is physically separated from the others, such as individually in an appropriate addressable array, and has been generated as the single product of an independent mutagenesis reaction. When a collection (library) of such proteins is contemplated, it will be so-stated.

[0150] As used herein, a “reporter cell” is the cell that “reports,” i.e., undergoes the change, in response to a condition, such as, for example, exposure to a protein or a virus or to a change it its external or internal environment.

[0151] As used herein, “reporter” or “reporter moiety” refers to any moiety that allows for the detection of a molecule of interest, such as a protein expressed by a cell. Reporter moieties include, but are not limited to, for example, fluorescent proteins, such as red, blue and green fluorescent proteins; LacZ and other detectable proteins and gene products. For expression in cells, nucleic acid encoding the reporter moiety can be expressed as a fusion protein with a protein of interest or under to the control of a promoter of interest.

[0152] As used herein, phenotype refers to the physical, physiological or other manifestation of a genotype (a sequence of a gene). In methods herein, phenotypes that result from alteration of a genotype are assessed.

[0153] As used herein, “activity” means in the largest sense of the term any change in a system (either biological, chemical or physical system) of any nature (changes in the amount of product in an enzymatic reaction, changes in cell proliferation, in immunogenicity, in toxicity) caused by a protein or protein mutant when they interact with that system. In addition, the term “activity,” “higher activity” or “lower activity” as used herein in reference to resistance to proteases, proteolysis, incubation with serum or with blood, means the ratio or residual biological (antiviral) activity between “after” protease/blood or serum treatment and “before” protease/blood or serum treatment.

[0154] As used herein, activity refers to the function or property to be evolved. An active site refers to a site(s) responsible or that participates in conferring the activity or function. The activity or active site evolved (the function or property and the site conferring or participating in conferring the activity) can have nothing to do with natural activities of a protein. For example, it could be an ‘active site’ for conferring immunogenicity (immunogenic sites or epitopes) on a protein.

[0155] As used herein, treatment means any manner in which the symptoms of a condition, disorder or disease are ameliorated or otherwise beneficially altered. Treatment also encompasses any pharmaceutical use of the modified cytokines and compositions provided herein herein.

[0156] As used herein, cytokine-mediated or cytokine-involved diseases refer to diseases in which cytokines potentiate, cause or are involved in the disease process or to diseases in which administration of a cytokine is ameliorative of a disease or symptoms thereof. Cytokines can be used in immunotherapeutic therapies or protocols.

[0157] As used herein, the amino acids, which occur in the various amino acid sequences appearing herein, are identified according to their known, three-letter or one-letter abbreviations (see, Table 1). The nucleotides, which occur in the various nucleic acid fragments, are designated with the standard single-letter designations used routinely in the art.

[0158] As used herein, amino acid residue refers to an amino acid formed upon chemical digestion (hydrolysis) of a polypeptide at its peptide linkages. The amino acid residues described herein are presumed to be in the “L” isomeric form. Residues in the “D” isomeric form, which are so-designated, can be substituted for any L-amino acid residue, as long as the desired functional property is retained by the polypeptide. NH₂ refers to the free amino group present at the amino terminus of a polypeptide. COOH refers to the free carboxy group present at the carboxyl terminus of a polypeptide. In keeping with standard polypeptide nomenclature described in J. Biol. Chem., 243:3552-3559, 1969, and adopted at 37 C.F.R. §§ 1.821-1.822, abbreviations for amino acid residues are shown in Table 1:

TABLE 1
Table of Correspondence

| SYMBOL | | |
|---|---|---|
| 1-Letter | 3-Letter | AMINO ACID |
| Y | Tyr | tyrosine |
| G | Gly | glycine |
| F | Phe | phenylalanine |
| M | Met | methionine |
| A | Ala | alanine |
| S | Ser | serine |
| I | Ile | isoleucine |
| L | Leu | leucine |
| T | Thr | threonine |
| V | Val | valine |
| P | Pro | proline |
| K | Lys | lysine |
| H | His | histidine |
| Q | Gln | glutamine |
| E | Glu | glutamic acid |
| Z | Glx | Glu and/or Gln |
| W | Trp | tryptophan |
| R | Arg | arginine |
| D | Asp | aspartic acid |
| N | Asn | asparagine |
| B | Asx | Asn and/or Asp |
| C | Cys | cysteine |
| X | Xaa | Unknown or other |

[0159] It should be noted that all amino acid residue sequences represented herein by formulae have a left to right orientation in the conventional direction of amino-terminus to carboxyl-terminus. In addition, the phrase “amino acid residue” is broadly defined to include the amino acids listed in the Table of Correspondence (Table 1) and modified and unusual amino acids, such as those referred to in 37 C.F.R. §§ 1.821-1.822, and incorporated herein by reference. Furthermore, it should be noted that a dash at the beginning or end of an amino acid residue sequence indicates a peptide bond to a further sequence of one or more amino acid residues or to an amino-terminal group such as NH₂ or to a carboxyl-terminal group such as COOH.

[0160] As used herein, nucleic acids include DNA, RNA and analogs thereof, including protein nucleic acids (PNA) and mixture thereof. Nucleic acids can be single or double stranded. When referring to probes or primers, optionally labeled, with a detectable label, such as a fluorescent or radiolabel, single-stranded molecules are contemplated. Such molecules are typically of a length such that they are statistically unique of low copy number (typically less than 5, generally less than 3) for probing or priming a library. Generally a probe or primer contains at least 14, 16 or 30 contiguous of sequence complementary to or identical a gene of interest. Probes and primers can be 10, 14, 16, 20, 30, 50, 100 or more nucleic acid bases long.

[0161] Therefore, as used herein, the term “identity” represents a comparison between a test and a reference polypeptide or polynucleotide. For example, a test polypeptide can be defined as any polypeptide that is 90% or more identical to a reference polypeptide.

[0162] As used herein, “corresponding structurally-related” positions on two or more proteins, such as the IFNα-2b protein and other cytokines, refers those amino acid positions determined based upon structural homology to maximize tri-dimensional overlapping between proteins.

[0163] As used herein, the term at least “90% identical to” refers to percent identities from 90 to 100% relative to the reference polypeptides. Identity at a level of 90% or more is indicative of the fact that, assuming for exemplification purposes a test and reference polypeptide length of 100 amino acids are compared. No more than 10% (i.e., 10 out of 100) amino acids in the test polypeptide differ from that of the reference polypeptides. Similar comparisons can be made between a test and reference polynucleotides. Such differences can be represented as point mutations randomly distributed over the entire length of an amino acid sequence or they can be clustered in one or more locations of varying length up to the maximum allowable, e.g., 10/100 amino acid difference (approximately 90% identity). Differences are defined as nucleic acid or amino acid substitutions, or deletions.

[0164] As used herein, the phrase “sequence-related proteins” refers to proteins that have at least 50%, at least 60%, at least 70%, at least 80%, at least 90%, at least 95% amino acid identity or homology with each other.

[0165] As used herein, families of non-related proteins or “sequence-non-related proteins” refers to proteins that have less than 50%, less than 40%, less than 0%, less thant 20% amino acid identity or homology with each other.

[0166] As used herein, it also is understood that the terms “substantially identical” or “similar” varies with the context as understood by those skilled in the relevant art.

[0167] As used herein, heterologous or foreign nucleic acid, such as DNA and RNA, are used interchangeably and refer to DNA or RNA that does not occur naturally as part of the genome in which it is present or which is found in a location or locations in the genome that differ from that in which it occurs in nature. Heterologous nucleic acid is generally not endogenous to the cell into which it is introduced, but has been obtained from another cell or prepared synthetically. Generally, although not necessarily, such nucleic acid encodes RNA and proteins that are not normally produced by the cell in which it is expressed. Heterologous DNA herein encompasses any DNA or RNA that one of skill in the art would recognize or consider as heterologous or foreign to the cell in which it is expressed. Heterologous DNA and RNA can also encode RNA or proteins that mediate or alter expression of endogenous DNA by affecting transcription, translation, or other regulatable biochemical processes. Examples of heterologous nucleic acid include, but are not limited to, nucleic acid that encodes traceable marker proteins, such as a protein that confers drug resistance, nucleic acid that encodes therapeutically effective substances, such as anti-cancer agents, enzymes and hormones, and DNA that encodes other types of proteins, such as antibodies.

[0168] Hence, herein heterologous DNA or foreign DNA, includes a DNA molecule not present in the exact orientation and position as the counterpart DNA molecule found in the genome. It can also refer to a DNA molecule from another organism or species (i.e., exogenous).

[0169] As used herein, a therapeutically effective dose refers to that amount of the compound sufficient to result in amelioration of symptoms of disease.

[0170] As used herein, isolated with reference to a nucleic acid molecule or polypeptide or other biomolecule means that the nucleic acid or polypeptide has separated from the genetic environment from which the polypeptide or nucleic acid were obtained. It can also mean altered from the natural state. For example, a polynucleotide or a polypeptide naturally present in a living animal is not “isolated,” but the same polynucleotide or polypeptide separated from the coexisting materials of its natural state is “isolated,” as the term is employed herein. Thus, a polypeptide or polynucleotide produced and/or contained within a recombinant host cell is considered isolated. Also intended as an “isolated polypeptide” or an “isolated polynucleotide” are polypeptides or polynucleotides that have been purified, partially or substantially, from a recombinant host cell or from a native source. For example, a recombinantly produced version of a compound can be substantially purified by the one-step method described in Smith et al., Gene, 67:31-40, 1988. The terms isolated and purified are sometimes used interchangeably.

[0171] Thus, by “isolated” is meant that the nucleic is free of the coding sequences of those genes that, in the naturally-occurring genome of the organism (if any) immediately flank the gene encoding the nucleic acid of interest. Isolated DNA can be single-stranded or double-stranded, and can be genomic DNA, cDNA, recombinant hybrid DNA, or synthetic DNA. It can be identical to a starting DNA sequence, or can differ from such sequence by the deletion, addition, or substitution of one or more nucleotides.

[0172] Isolated or purified as it refers to preparations made from biological cells or hosts means any cell extract containing the indicated DNA or protein including a crude extract of the DNA or protein of interest. For example, in the case of a protein, a purified preparation can be obtained following an individual technique or a series of preparative or biochemical techniques and the DNA or protein of interest can be present at various degrees of purity in these preparations. The procedures can include for example, but are not limited to, ammonium sulfate fractionation, gel filtration, ion exchange change chromatography, affinity chromatography, density gradient centrifugation and electrophoresis.

[0173] A preparation of DNA or protein that is “substantially pure” or “isolated” should be understood to mean a preparation free from naturally occurring materials with which such DNA or protein is normally associated in nature. “Essentially pure” should be understood to mean a “highly” purified preparation that contains at least 95% of the DNA or protein of interest.

[0174] A cell extract that contains the DNA or protein of interest should be understood to mean a homogenate preparation or cell-free preparation obtained from cells that express the protein or contain the DNA of interest. The term “cell extract” is intended to include culture media, especially spent culture media from which the cells have been removed.

[0175] As used herein, “a targeting agent” refers to any molecule that can bind another target-molecule, such as an antibody, receptor, or ligand.

[0176] As used herein, receptor refers to a biologically active molecule that specifically binds to (or with) other molecules. The term “receptor protein” can be used to more specifically indicate the proteinaceous nature of a specific receptor.

[0177] As used herein, recombinant refers to any progeny formed as the result of genetic engineering.

[0178] As used herein, a promoter region refers to the portion of DNA of a gene that controls transcription of the DNA to which it is operatively linked. The promoter region includes specific sequences of DNA that are sufficient for RNA polymerase recognition, binding and transcription initiation. This portion of the promoter region is referred to as the promoter. In addition, the promoter region includes sequences that modulate this recognition, binding and transcription initiation activity of the RNA polymerase. These sequences can be cis acting or can be responsive to trans acting factors. Promoters, depending upon the nature of the regulation, can be constitutive or regulated.

[0179] As used herein, the phrase “operatively linked” generally means the sequences or segments have been covalently joined into one piece of DNA, whether in single or double stranded form, whereby control or regulatory sequences on one segment control or permit expression or replication or other such control of other segments. The two segments are not necessarily contiguous. For gene expression a DNA sequence and a regulatory sequence(s) are connected in such a way to control or permit gene expression when the appropriate molecular, e.g., transcriptional activator proteins, are bound to the regulatory sequence(s).

[0180] As used herein, production by recombinant means by using recombinant DNA methods means the use of the well known methods of molecular biology for expressing proteins encoded by cloned DNA, including cloning expression of genes and methods, such as gene shuffling and phage display with screening for desired specificities.

[0181] As used herein, a splice variant refers to a variant produced by differential processing of a primary transcript of genomic DNA that results in more than one type of mRNA.

[0182] As used herein, a composition refers to any mixture of two or more products or compounds. It can be a solution, a suspension, liquid, powder, a paste, aqueous, non-aqueous or any combination thereof.

[0183] As used herein, a combination refers to any association between two or more items.

[0184] As used herein, substantially identical to a product means sufficiently similar so that the property of interest is sufficiently unchanged so that the substantially identical product can be used in place of the product.

[0185] As used herein, the term “vector” refers to a nucleic acid molecule capable of transporting another nucleic acid to which it has been linked. One type of exemplary vector is an episome, i.e., a nucleic acid capable of extra-chromosomal replication. Exemplary vectors are those capable of autonomous replication and/or expression of nucleic acids to which they are linked. Vectors capable of directing the expression of genes to which they are operatively linked are referred to herein as “expression vectors.” In general, expression vectors of utility in recombinant DNA techniques are often in the form of “plasmids” which refer generally to circular double stranded DNA loops which, in their vector form are not bound to the chromosome. “Plasmid” and “vector” are used interchangeably as the plasmid is the most commonly used form of vector. Other such other forms of expression vectors that serve equivalent functions and that become known in the art subsequently hereto.

[0186] As used herein, vector also is used interchangeable with “virus vector” or “viral vector. In this case, which will be clear from the context, the “vector” is not self-replicating. Viral vectors are engineered viruses that are operatively linked to exogenous genes to transfer (as vehicles or shuttles) the exogenous genes into cells.

[0187] As used herein, transduction refers to the process of gene transfer into and expression in mammalian and other cells mediated by viruses. Transfection refers to the process when mediated by plasmids.

[0188] As used herein, transformation refers to the process of gene transfer into and expression in bacterial cells mediated by plasmids.

[0189] As used herein, “allele,” which is used interchangeably herein with “allelic variant” refers to alternative forms of a gene or portions thereof. Alleles occupy the same locus or position on homologous chromosomes. When a subject has two identical alleles of a gene, the subject is said to be homozygous for the gene or allele. When a subject has two different alleles of a gene, the subject is said to be heterozygous for the gene. Alleles of a specific gene can differ from each other in a single nucleotide, or several nucleotides, and can include substitutions, deletions, and insertions of nucleotides. An allele of a gene also can be a form of a gene containing a mutation.

[0190] As used herein, the term “gene” or “recombinant gene” refers to a nucleic acid molecule comprising an open reading frame and including at least one exon and (optionally) an intron sequence. A gene can be either RNA or DNA. Genes can include regions preceding and following the coding region (leader and trailer).

[0191] As used herein, “intron” refers to a DNA sequence present in a given gene which is spliced out during mRNA maturation.

[0192] As used herein, “nucleotide sequence complementary to the nucleotide sequence set forth in SEQ ID NO:” refers to the nucleotide sequence of the complementary strand of a nucleic acid strand having the particular SEQ ID NO:. The term “complementary strand” is used herein interchangeably with the term “complement.” The complement of a nucleic acid strand can be the complement of a coding strand or the complement of a non-coding strand. When referring to double stranded nucleic acids, the complement of a nucleic acid having a particular SEQ ID NO: refers to the complementary strand of the strand set forth in the particular SEQ ID NO: or to any nucleic acid having the nucleotide sequence of the complementary strand of the particular SEQ ID NO:. When referring to a single stranded nucleic acid having a nucleotide sequence corresponding to a particular SEQ ID NO:, the complement of this nucleic acid is a nucleic acid having a nucleotide sequence which is complementary to that of the particular SEQ ID NO:.

[0193] As used herein, the term “coding sequence” refers to that portion of a gene that encodes an amino acid sequence of a protein.

[0194] As used herein, the term “sense strand” refers to that strand of a double-stranded nucleic acid molecule that has the sequence of the mRNA that encodes the amino acid sequence encoded by the double-stranded nucleic acid molecule.

[0195] As used herein, the term “antisense strand” refers to that strand of a double-stranded nucleic acid molecule that is the complement of the sequence of the mRNA that encodes the amino acid sequence encoded by the double-stranded nucleic acid molecule.

[0196] As used herein, an array refers to a collection of elements, such as nucleic acid molecules, containing three or more members. An addressable array is one in which the members of the array are identifiable, typically by position on a solid phase support or by virtue of an identifiable or detectable label, such as by color, fluorescence, electronic signal (i.e., RF, microwave or other frequency that does not substantially alter the interaction of the molecules of interest), bar code or other symbology, chemical or other such label. In certain embodiments, the members of the array are immobilized to discrete identifiable loci on the surface of a solid phase or directly or indirectly linked to or otherwise associated with the identifiable label, such as affixed to a microsphere or other particulate support (herein referred to as beads) and suspended in solution or spread out on a surface.

[0197] As used herein, a support (also referred to as a matrix support, a matrix, an insoluble support or solid support) refers to any solid or semisolid or insoluble support to which a molecule of interest, typically a biological molecule, organic molecule or biospecific ligand is linked or contacted. Such materials include any materials that are used as affinity matrices or supports for chemical and biological molecule syntheses and analyses, such as, but are not limited to: polystyrene, polycarbonate, polypropylene, nylon, glass, dextran, chitin, sand, pumice, agarose, polysaccharides, dendrimers, buckyballs, polyacryl-amide, silicon, rubber, and other materials used as supports for solid phase syntheses, affinity separations and purifications, hybridization reactions, immunoassays and other such applications. The matrix herein can be particulate or can be in the form of a continuous surface, such as a microtiter dish or well, a glass slide, a silicon chip, a nitrocellulose sheet, nylon mesh, or other such materials. When particulate, typically the particles have at least one dimension in the 5-10 mm range or smaller. Such particles, referred collectively herein as “beads,” are often, but not necessarily, spherical. Such reference, however, does not constrain the geometry of the matrix, which can be any shape, including random shapes, needles, fibers, and elongated. Roughly spherical “beads,” particularly microspheres that can be used in the liquid phase, also are contemplated. The “beads” can include additional components, such as magnetic or paramagnetic particles (see, e.g., Dynabeads (Dynal, Oslo, Norway)) for separation using magnets, as long as the additional components do not interfere with the methods and analyses herein.

[0198] As used herein, a matrix or support particles refers to matrix materials that are in the form of discrete particles. The particles have any shape and dimensions, but typically have at least one dimension that is 100 mm or less, 50 mm or less, 10 mm or less, 1 mm or less, 100 μm or less, 50 μm or less and typically have a size that is 100 mm³ or less, 50 mm³ or less, 10 mm³ or less, and 1 mm³ or less, 100 μm³ or less and can be order of cubic microns. Such particles are collectively called “beads.”

[0199] As used herein, the abbreviations for any protective groups, amino acids and other compounds, are, unless indicated otherwise, in accord with their common usage, recognized abbreviations, or the IUPAC-IUB Commission on Biochemical Nomenclature (see, Biochem., 11:942-944, 1972).

[0200] B. Directed Evolution

[0201] To date, there have been three general approaches described for protein directed evolution based on mutagenesis.

[0202] 1) Pure Random Mutagenesis

[0203] Random mutagenesis methodology requires that the amino acids in the starting protein sequence are replaced by all (or a group) of the 20 amino acids. Either single or multiple replacements at different amino acid positions are generated on the same molecule, at the same time. The random mutagenesis method relies on a direct search for fitness improvement based on random amino acid replacement and sequence changes at multiple amino acid positions. In this approach neither the amino acid position (first dimension) nor the amino acid type (second dimension) are restricted; and everything possible is generated and tested. Multiple replacements can randomly happen at the same time on the same molecule. For example, random mutagenesis methods are widely used to develop antibodies with higher affinity for its ligand, by the generation of random-sequence libraries of antibody molecules, followed by expression and screening using filamentous phages.

[0204] 2) Restricted Random Mutagenesis

[0205] Restricted random mutagenesis methods introduce either all of the 20 amino acids or DNA-biased residues. The bias is based on the sequence of the DNA and not on that of the protein, in a stochastic or semi-stochastic manner, respectively, within restricted or predefined regions of the protein, known in advance to be involved in the biological activity being “evolved.” This method relies on a direct search for fitness improvement based on random amino acid replacement and sequence changes at either restricted or multiple amino acid positions. In this approach the scanning can be restricted to selected amino acid positions and/or amino acid types, while material changes continue to be random in position and type. For example, the amino acid position can be restricted by prior selection of the target region to be mutated (selection of target region is based upon prior knowledge on protein structure/function); while the amino acid type is not primarily restricted as replacing amino acids are stochastically or at most “semi-stochastically” chosen. As an example, this method is used to optimize known binding sites on proteins, including hormone-receptor systems and antibody-epitope systems.

[0206] 3) Non-restricted Rational Mutagenesis

[0207] Rational mutagenesis is a two-step process and is described in co-pending U.S. application Ser. No. 10/022,249. Briefly, the first step requires amino acid scanning where all and each of the amino acids in the starting protein sequence are replaced by a third amino acid of reference (e.g., alanine). Only a single amino acid is replaced on each protein molecule at a time. A collection of protein molecules having a single amino acid replacement is generated such that molecules differ from each other by the amino acid position at which the replacement has taken place. Mutant DNA molecules are designed, generated by mutagenesis and cloned individually, such as in addressable arrays, such that they are physically separated from each other and such that each one is the single product of an independent mutagenesis reaction. Mutant protein molecules derived from the collection of mutant nucleic acid molecules also are physically separated from each other, such as by formatting in addressable arrays. Activity assessment on each protein molecule allows for the identification of those amino acid positions that result in a drop in activity when replaced, thus indicating the involvement of that particular amino acid position in the protein's biological activity and/or conformation that leads to fitness of the particular feature being evolved. Those amino acid positions are referred to as HITs. At the second step, a new collection of molecules is generated such that each molecule differs from each of the others by the amino acid present at the individual HIT positions identified in step 1. All 20 amino acids (19 remaining) are introduced at each of the HIT positions identified in step 1; while each individual molecule contains, in principle, one and only one amino acid replacement. Mutant DNA molecules are designed, generated by mutagenesis and cloned individually, such as in in addressable arrays, such that they are physically separated from each other and such that each one is the single product of an independent mutagenesis reaction. Mutant protein molecules derived from the collection of mutant DNA molecules also are physically separated from each other, such as by formatting in addressable arrays. Activity assessment then is individually performed on each individual mutant molecule. The newly generated mutants that lead to a desired alteration (such as an improvement) in a protein activity are referred to as LEADs. This method permits an indirect search for activity alteration, such as improvement, based on one rational amino acid replacement and sequence change at a single amino acid position at a time, in search of a new, unpredicted amino acid sequence at some unpredicted regions along a protein to produce a protein that exhibits a desired activity or altered activity, such as better performance than the starting protein.

[0208] In this approach, neither the amino acid position nor the replacing amino acid type are restricted. Full length protein scanning is performed during the first step to identify HIT positions, and then all 20 amino acids are tested at each of the HIT positions, to identify LEAD sequences; while, as a starting point, only one amino acid at a time is replaced on each molecule. The selection of the target region (HITs and surrounding amino acids) for the second step is based upon experimental data on activity obtained in the first step. Thus, no prior knowledge of protein structure and/or function is necessary. Using this approach, LEAD sequences have been found on proteins that are located at regions of the protein not previously known to be involved in the particular biological activity being optimized; thus emphasizing the power of this approach to discover unpredictable regions (HITs) as targets for fitness improvement.

[0209] C. 2-Dimensional Rational Scanning

[0210] The 2-Dimensional rational scanning (or “2-dimensional scanning”) methods for protein rational evolution provided herein (see, also copending U.S. application Ser. No. Attorney docket no. 923, filed the same day herewith, based on U.S. provisional application Serial Nos. 60/457,063 and 60/410,258) are based on scanning over two dimensions. The first dimension scanned is amino acid position along the protein sequence to identify is-HIT target positions, and the second dimension is the amino acid type selected for replacing a particular is-HIT amino acid position. An advantage of the 2-dimensional scanning methods provided herein is that at least one, and typically both, of the amino acid position scan and/or the replacing amino acid scan can be restricted such that fewer than all amino acids on the protein-backbone are selected for amino acid replacement; and/or fewer than all of the remaining 19 amino acids available to replace an original, such as native, amino acid are selected for replacement.

[0211] In particular embodiments, based on i) the particular protein properties to be evolved, ii) the protein's amino acid sequence, and iii) the known properties of the individual amino acids, a number of target positions along the protein sequence are selected, in silico, as “is-HIT target positions.” This number of is-HIT target positions is as large as possible such that all reasonably possible target positions for the particular feature being evolved are included. In particular, embodiments where a restricted number of is-HIT target positions are selected for replacement, the amino acids selected to replace the is-HIT target positions on the particular protein being optimized can be either all of the remaining 19 amino acids or, more frequently, a more restricted group comprising selected amino acids that are contemplated to have the desired effect on protein activity. In another embodiment, so long as a restricted number of replacing amino acids are used, all of the amino acid positions along the protein backbone can be selected as is-HIT target positions for amino acid replacement. Mutagenesis then is performed by the replacement of single amino acid residues at specific is-HIT target positions on the protein backbone (e.g., “one-by-one,” such as in addressable arrays), such that each individual mutant generated is the single product of each single mutagenesis reaction. Mutant DNA molecules are designed, generated by mutagenesis and cloned individually, such as in addressable arrays, such that they are physically separated from each other and that each one is the single product of an independent mutagenesis reaction. Mutant protein molecules derived from the collection of mutant DNA molecules also are physically separated from each other, such as by formatting in in addressable arrays. Thus, a plurality of mutant protein molecules are produced. Each mutant protein contains a single amino acid replacement at only one of the is-HIT target positions. Activity assessment is then individually performed on each individual protein mutant molecule, following protein expression and measurement of the appropriate activity. An example of practice of this this method is shown in the Example in which mutant IFNα molecules and IFNβ moleucles are produced.

[0212] The newly generated proteins that lead to altered, typically improvement, in a target protein activity are referred to as LEADs. This method relies on an indirect search for protein improvement for a particular activity, such as increased resistance to proteolysis, based on a rational amino acid replacement and sequence change at single or, in another embodiment, a limited number of amino acid positions at a time.

[0213] As a result, optimized proteins that have new amino acid sequences at some regions along the protein that perform better (at a particular target activity or other property) than the starting protein are identified and isolated.

[0214] 1) Identifying In-Silico HITs

[0215] Provided herein is a method for directed evolution that includes identifying and selecting (using in silico analysis) specific amino acids and amino acid positions (referred to herein as is-HITs) along the protein sequence that are contemplated to be directly or indirectly involved in the feature being evolved. As noted, the 2-dimensional scanning methods provided include the following two-steps. The first step is an in silico search of a target protein's amino acid sequence to identify all possible amino acid positions that potentially can be targets for the activity being evolved. This is effected, for example, by assessing the effect of amino acid residues on the property(ies) to be altered on the protein, using any known standard software. The particulars of the in silico analysis is a function of the property to be modified. For example, in the example herein, a property that is altered resistance of the protein to proteolysis. To determine aminoacid residues that are potential targets as is-HITs, in this example, all possible target residues for proteases were first identified. The 3-dimensional structure of the protein was then considered in order to identify surface residues. Comparison of exposed residues with proteolytically cleavable residues yields residues that are targets for change.

[0216] Once identified, these amino acid positions or target sequences are referred to as “is-HITs” (in silico HITs). In silico HITs are defined as those amino acid positions (or target positions) that potentially are involved in the “evolving” feature, such as increased resistance to proteolysis. In one embodiment, the discrimination of the is-HITs among all the amino acid positions in a protein sequence is made based on i) the amino acid type at each position in addition to, whenever available but not necessarily, ii) the information on the protein secondary or tertiary structure. In silico HITs constitute a collection of mutant molecules such that all possible amino acids, amino acid positions or target sequences potentially involved in the evolving feature are represented. No strong theoretical discrimination among amino acids or amino acid positions is made at this stage.

[0217] In silico HIT positions are spread over the full length of the protein sequence. In one embodiment, only a single is-HIT amino acid at a time is replaced on the target protein. In another embodiment, a limited number of is-HIT amino acids are replaced at the same time on the same target protein molecule. The selection of target regions (is-HITs and surrounding amino acids) for the second step is based upon rational assumptions and predictions. No prior knowledge of protein structure/function is necessary. Hence, the 2-dimensional scanning methodology provided herein does not require any previous knowledge of the 3-dimensional conformational structure of the protein.

[0218] Any protein known or otherwise available to those of skill in the art is suitable for modification using the directed evolution methods provided herein, including cytokines (e.g., IFNα-2b) or any other proteins that have previously been mutated or optimized.

[0219] A variety of parameters can be analyzed to determine whether or not a particular amino acid on a protein might be involved in the evolving feature. For example, the information provided by crystal structures of proteins can be rationally exploited in order to perform a computer-assisted (in silico) analysis towards the prediction of variants with desired features. In a particular embodiment, a limited number of initial premises (typically no more than 2) are used to determine the in silico HITs. In other embodiments, the number of premises used to determine the in silico hits can range from 1 to 10 premises, including no more than 9, no more than 8, no more than 7, no more than 6, no more than 5, no more than 4, no more than 3, but are typically no more than 2 premises. It is important to the methods provided herein that the number of initial premises be kept to a minimum, so as to maintain the number of potential is-HITs at a maximum (here is where the methods provided are not limited by too much prediction based on theoretical assumptions). When two premises are employed, the first condition is typically the amino acid type itself, which is directly linked to the nature of the evolving feature. For example, if the goal were to change the optimum pH for an enzyme, then the replacing amino acids selected at this step for the replacement of the original sequence would be only those with a certain pKa value. The second premise is typically related to the specific position of those amino acids along the protein structure. For example, some amino acids might be discarded if they are not expected to be exposed enough to the solvent, even when they might have appropriate pKa values.

[0220] During the first step of identification of is-HITs according to the methods provided herein, each individual amino acid along the protein sequence is considered individually to assess whether it is a candidate for is-HIT. This search is done one-by-one and the decision on whether the amino acid is considered to be a candidate for a is-HIT is based on (1) the amino acid type itself; (2) the position on the amino acid sequence and protein structure if known; and (3) the predicted interaction between that amino acid and its neighbors in sequence and space.

[0221] Using the 3D-scanning methods provided herein, once one protein within a family of proteins (e.g., IFNα-2b within the cytokine family) is optimized using the methods provided herein for generating LEAD mutants, is-HITs can be identified on other or all proteins within a particular family by identifying the corresponding amino acid positions therein using structural homology analysis (based upon comparisons of the 3-D structures of the family members with original protein to identify corresponding residues for replacement) as described hereinafter. The is-HITs on family identified in this manner then can be subjected to the next step of identifying replacing amino acids and further assayed to obtain LEADs or super-LEADs as described herein.

[0222] 2) Identifying Replacing Amino Acids

[0223] Once the is-HITs target positions are selected, the next step is identifying those amino acids that will replace the original, such as native, amino acid at each is-HIT position to alter the activity level for the particular feature being evolved. The set of replacing amino acids to be used to replace the original, such as native, amino acid at each is-HIT position can be different and specific for the particular is-HIT position. The choice of the replacing amino acids takes into account the need to preserve the physicochemical properties such as hydrophobicity, charge and polarity, of essential (e.g., catalytic, binding, etc.) residues. The number of replacing amino acids, of the remaining 19 non-native (or non-original) amino acids, that can be used to replace a particular is-HIT target position ranges from 1 up to about 19, from 1 up to about 15, from 1 up to about 10, from 1 up to about 9, from 1 up to about 8, from 1 up to about 7, from 1 up to about 6, from 1 up to about 5, from 1 up to about 4, from 1 up to about 3, or from 1 to 2 amino acid replacements.

[0224] Numerous methods of selecting replacing amino acids (also referred to herein as “replacement amino acids”) are well known in the art. Protein chemists determined that certain amino acid substitutions commonly occur in related proteins from different species. As the protein still functions with these substitutions, the substituted amino acids are compatible with protein structure and function. Often, these substitutions are to a chemically similar amino acid, but other types of changes, although relatively rare, can also occur.

[0225] Knowing the types of changes that are most and least common in a large number of proteins can assist with predicting alignments and amino acid substitutions for any set of protein sequences. Amino acid substitution matrices are used for this purpose.

[0226] In amino acid substitution matrices, amino acids are listed across the top of a matrix and down the side, and each matrix position is filled with a score that reflects how often one amino acid would have been paired with the other in an alignment of related protein sequences. The probability of changing amino acid A into amino acid B is assumed to be identical to the reverse probability of changing B into A. This assumption is made because, for any two sequences, the ancestor amino acid in the phylogenetic tree is usually not known. Additionally, the likelihood of replacement should depend on the product of the frequency of occurrence of the two amino acids and on their chemical and physical similarities. A prediction of this model is that amino acid frequencies will not change over evolutionary time (Dayhoff et al., Atlas of Protein Sequence and Structure, 5(3):345-352, 1978). Below are several exemplary amino acid substitution matrices, including, but not limited to block substitution matrix (BLOSUM), Jones, Gonnet, Fitch, Feng, McLachlan, Grantham, Miyata, Rao, Risler, Johnson and percent accepted mutation (PAM). Any such method known to those of skill in the art can be employed.

[0227] (a) Percent Accepted Mutation (PAM)

[0228] Dayhoff and coworkers developed a model of protein evolution that resulted in the development of a set of widely used replacement matrices (Dayhoff et al., Atlas of Protein Sequence and Structure, 5(3):345-352, 1978) termed percent accepted mutation matrices (PAM). In deriving these matrices, each change in the current amino acid at a particular site is assumed to be independent of previous mutational events at that site. Thus, the probability of change of any amino acid A to amino acid B is the same, regardless of the previous changes at that site and also regardless of the position of amino acid A in a protein sequence.

[0229] In the Dayhoff approach, replacement rates are derived from alignments of protein sequences that are at least 85% identical; this constraint ensures that the likelihood of a particular mutation being the result of a set of successive mutations is low. Because these changes are observed in closely related proteins, they represent amino acid substitutions that do not significantly change the function of the protein. Hence, they are called “accepted mutations,” as defined as amino acid changes that are accepted by natural selection.

[0230] (i) PAM Analysis

[0231] In particular embodiments of the methods provided herein, “Percent Accepted Mutation” (PAM; Dayhoff et al., Atlas of Protein Sequence and Structure, 5(3):345-352, 1978 FIG. 2) PAM values are used to select an appropriate group of replacement amino acids. PAM matrices were originally developed to produce alignments between protein sequences based evolutionary distances. Because, in a family of proteins or homologous (related) sequences, identical or similar amino acids (85% similarity) are shared, conservative substitutions for, or allowed point mutations of the corresponding amino acid residues can be determined throughout an aligned reference sequence. Conservative substitutions of a residue in a reference sequence are those substitutions that are physically and functionally similar to the corresponding reference residues, e.g., that have a similar size, shape, electric charge, chemical properties, including the ability to form bonds such as covalent and hydrogen bonds. Particularly suitable conservative amino acid substitutions are those that show the highest scores and fulfill the PAM matrix criteria in the form of “accepted point mutations.” For example, by comparing a family of scoring matrices, Dayhoff et al., Atlas of Protein Sequence and Structure, 5(3):345-352, 1978, found a consistently higher score significance when using PAM250 matrix to analyze a variety of proteins, known to be distantly related.

[0232] (ii) PAM 250

[0233] In a particular embodiment, the PAM250 matrix set forth in FIG. 2 is used for determining the replacing amino acids based on similarity criteria. The PAM250 matrix uses data obtained directly from natural evolution to facilitate the selection of replacing amino acids for the is-HITs to generate conservative mutations without much affecting the overall protein function. By using the PAM250 matrix, candidate replacing amino acids are identified from related proteins from different organisms.

[0234] (b) Jones and Gonnet

[0235] This method (see, e.g., Jones et al., Comput. Appl. Biosci., 8:275-282, 1992 and Gonnet et al., Science, 256:1433-1445, 1992) uses much of the same methodology as Dayhoff (see below), but with modern databases. The matrix of Jones et al., is extracted from Release 15.0 of the SWISS-PROT protein sequence database. Point mutations totaling 59,160 from 16,130 protein sequences were used to calculate a PAM250 (see below) matrix.

[0236] The matrix published by Gonnet et al., Science, 256:1433-1445, 1992, was built from a sequence database of 8,344,353 amino acid residues. Each sequence was compared against the entire database, such that 1.7×10⁶ subsequent matches resulted for the significant alignments. These matches were then used to generate a matrix with a PAM distance of 250.

[0237] (c) Fitch and Feng

[0238] Fitch, J. Mol. Evol., 16(1):9-16, 1966, used an exchange matrix that contained for each pair (A, B) of amino acid types the minimum number of nucleotides that must be changed to encode amino acid A instead of amino acid B. Feng et al., J. Mol. Evol., 21:112-125, 1985, used an enhanced version of Fitch, J. Mol. Evol., 16(1):9-16, 1966, to build a Structure-Genetic matrix. In addition to considering the minimum number of base changes required to encode amino acid B instead of A, this method also considers the structural similarity of the amino acids.

[0239] (d) McLachlan, Grantham and Miyata

[0240] McLachlan, J. Mol. Biol., 61:409-424 1971, used 16 protein families, each with 2 to 14 members. The 89 sequences were aligned and the pairwise exchange frequency, observed in 9280 substitutions, was used to generate an exchange matrix with values varying from 0 to 9.

[0241] Grantham, Science, 185:862-864, 1974, considers composition, polarity and molecular volume of amino acid side-chains, properties that were highly correlated to the relative substitution frequencies tabulated by McLachlan, J. Mol. Biol., 61:409-424, 1971, to build the matrix.

[0242] Miyata, J. Mol. Evol., 12:219-236, 1979, uses the volume and polarity values of amino acids published by Grantham, Science, 185:862-864, 1974. For every amino acid type pair, the difference for both properties was calculated and divided by the standard deviation of all the differences. The square root of the sum of both values is then used in the matrix.

[0243] (e) Rao

[0244] Rao, J. Pept. Protein Res., 29:276-281, 1987, employs five amino acid properties to create a matrix; namely, alpha-helical, beta-strand and reverse-turn propensities as well as polarity and hydrophobicity. The standardized properties were summed and the matrix rescaled to the same average as that for PAM (Dayhoff et al., Atlas of Protein Sequence and Structure, 5(3):345-352, 1978).

[0245] (f) Risler

[0246] Risler et al., J. Mol. Biol., 204:1019-1029, 1988, aligned 32 three-dimensional structures from 11 protein families by rigid-body superposition of the backbone topology. Only substitutions were considered where at least three adjacent and equivalent main-chain C⁰ atom pairs in the compared structures were each not more than 1.2 Å apart. A total of 2860 substitutions were considered and used to build a matrix based on χ² distance calculations.

[0247] (g) Johnson

[0248] Johnson et al., J. Mol. Biol., 233:716-738, 1993, derived their matrix from the tertiary structural alignment of 65 families in a database of 235 structures created with the method of Sali et al., J. Mol. Biol., 212:403-428, 1990. Their examination of the substitutions was based on the expected and observed ratios of occurrences and the final matrix values were taken as log₁₀ of the ratios.

[0249] (h) Block Substitution Matrix (BLOSUM)

[0250] One empirical approach (Henikoff et al., Proc. Natl. Acad. Sci. USA, 89:10915-10919, 1992) uses local, ungapped alignments of distantly related sequences to derive the blocks amino acid substitution matrix (BLOSUM) series of matrices. The matrix values are based on the observed amino acid substitutions in a larger set of about 2000 conserved amino acid patterns, termed blocks. These blocks act as signatures of families of related proteins. Matrices of this series are identified by a number after the matrix (e.g., BLOSUM50), which refers to the minimum percentage identity of the blocks of multiple aligned amino acids used to construct the matrix. It is noteworthy that these matrices are directly calculated without extrapolations, and are analogous to transition probability matrices P(T) for different values of T, estimated without reference to any rate matrix Q.

[0251] The outcome of these two steps set forth above, which is performed in silico is that: (1) the amino acid positions that will be the target for mutagenesis are identified; these positions are referred to as is-HITs; (2) the replacing amino acids for the original, such as native, amino acids at the is-HITs are identified, to provide a collection of candidate LEAD mutant molecules that are expected to perform different from the native one. These are are assayed for a desired optimized (or improved or altered) biological activity.

[0252] 3) Physical Construction of Mutant Proteins and Biological Assays

[0253] Once is-HITs are selected as set forth above, replacing amino acids are introduced. Mutant proteins typically are prepared using recombinant DNA methods and assessed in appropriate biological assays for the particular biological activity (feature) optimized (see, e.g., Example 1). An exemplary method of preparing the mutant proteins is by mutagenesis of the original, such as native, gene using methods well known in the art. Mutant molecules are generated one-by-one, such as in addressable arrays, such that each individual mutant generated is the single product of each single and independent mutagenesis reaction. Individual mutagenesis reactions are conducted separately, such as in addressable arrays where they are physically separated from each other. Once a population of sets of nucleic acid molecules encoding the respective mutant proteins is prepared, each is separately introduced one-by-one into appropriate cells for the production of the corresponding mutant proteins. This can also be performed, for example, in addressable arrays where each set of nucleic acid molecules encoding a respective mutant protein is introduced into cells confined to a discrete location, such as in a well of a multi-well microtiter plate. Each individual mutant protein is individually phenotypically characterized and performance is quantitatively assessed using assays appropriate for the feature being optimized (i.e., feature being evolved). Again, this step can be performed in addressable arrays. Those mutants displaying a desired increased or decreased performance compared to the original, such as native molecules are identified and designated LEADs. From the beginning of the process of generating the mutant DNA molecules up through the readout and analysis of the performance results, each candidate LEAD mutant is generated, produced and analyzed individually, such as from its own address in an addressable array. The process is amenable to automation.

[0254] D. 2-Dimensional Scanning of Proteins for lncr ased Resistanc to Proteolysis

[0255] The methods of 2-dimensional scanning permit preparation of proteins modified for a selected trait, activity or other phenotype. Among modifications of interest for therapeutic proteins are those that increase protection against protease digestion while maintaining the requisite biological activity. Such changes are useful for producing longer-lasting therapeutic proteins.

[0256] The delivery of stable peptide and protein drugs to patients is a major challenge for the pharmaceutical industry. These types of drugs in the human body are constantly eliminated or taken out of circulation by different physiological processes including internalization, glomerular filtration and proteolysis. The latter is often the limiting process affecting the half-life of proteins used as therapeutic agents in per-oral administration and either intravenous or intramuscular injections.

[0257] The 2-dimensional scanning process for protein evolution is used to effectively improve protein resistance to proteases and thus increase protein half-life in vitro and, ultimately in vivo. As noted, the methods provided herein for designing and generating highly stable, longer lasting proteins, or proteins having a longer half-life include: i) identifying some or all possible target sites on the protein sequence that are susceptible to digestion by one or more specific proteases (these sites are referred to herein as is-HITs); ii) identifying appropriate replacing amino acids, specific for each is-HIT, such that upon replacement of one or more of the original, such as native, amino acids at that specific is-HIT, they can be expected to increase the is-HIT's resistance to digestion by protease while at the same time, maintaining or improving the requisite biological activity of the protein (these proteins with replaced amino acids are the “candidate LEADs”); iii) systematically introducing the specific replacing amino acids (candidate LEADs) at every specific is-HIT target position to generate a collection containing the corresponding mutant candidate lead molecules. Mutants are generated, produced and phenotypically characterized one-by-one, such as in addressable arrays, such that each mutant molecule contains initially an amino acid replacement at only one is-HIT site.

[0258] In particular embodiments, such as in subsequent rounds, mutant molecules also can be generated that contain one or more amino acids at one or more is-HIT sites that have been replaced by candidate LEAD amino acids. Those mutant proteins carrying one or more mutations at one or more is-HITs, and that display improved protease resistance are called LEADs (one mutation at one is-HIT) and super-LEADs (mutations at more than one is-HIT).

[0259] The first step of the process takes into consideration existing knowledge from different domains:

[0260] (1) About the galenic and the delivery environment (tissue, organ or corporal fluid) of the particular therapeutic protein in order to establish a list of proteases more likely to be found in that environment. For example, a therapeutic protein in per-oral application is likely to encounter typical proteases of the luminal gastrointestinal tract. In contrast, if this protein were injected in the blood circulation, serum proteases would be implicated in the proteolysis. Based on the specific list of proteases involved, the complete list of all amino acid sequences that potentially could be targeted by the proteases in the list is determined.

[0261] (2) Since protease mixtures in the body are quite complex in composition, almost all the residues in any target protein potentially are targeted for proteolysis (FIG. 6A). Nevertheless, proteins form specific tri-dimensional structures where residues are more or less exposed to the environment and protease action. It can be assumed that those residues constituting the core of a protein are inaccessible to proteases, while those more ‘exposed’ to the environment are better targets for proteases. The probability for every specific amino acid to be ‘exposed’ and then to be accessible to proteases can be taken into account to reduce the number of is-HIT. Consequently, the methods herein consider the analysis with respect to solvent “exposure” or “accessibility” for each individual amino acid in the protein sequence. Solvent accessibility of residues can alternatively be estimated, regardless of any previous knowledge of specific protein structural data, by using an algorithm derived from empirical amino acid probabilities of accessibility, which is expressed in the following equation (Boger et al., Reports of the Sixth International Congress in Immunology, p. 250, 1986):

$$A ( i ) = [ {\prod }_{j = 1}^{6} \_δ {\_}_{i + 4 \cdot j} ] * {[ 0.62 ]}^{- 6} .$$

[0262] Briefly, these are fractional probabilities (δ_{—(i)}) determined for an amino acid (i) found on the surface of a protein, which are based upon structural data from a set of several proteins. It is thus possible to calculate the solvent accessibility (A) of an amino acid (A(i)) at sequence position (i-2 to i+3, onto a sliding window of length equal to 6) that is within an average surface accessible to solvent of >20 square angstroms (Å²).

[0263] The protease accessible target amino acids along the protein sequence, i.e., the amino acids to be replaced, are thus identified and are referred to herein as in silico HITs (is-HITs).

[0264] Amino acids at the is-HITs then are replaced by residues that render the sequence less vulnerable (by a factor, for example, of 1%, 10%, 20%, 30%, 40%, 50%, . . . . 100% depending upon the protein) or invulnerable (substantially no detectable digestion within a set time period) to protease digestion, while at the same time maintain a biological activity or activities of interest of the protein. The choice of the replacing amino acids is complicated by (1) the broad target specificity of certain proteases and (2) the need to preserve the physicochemical properties such as hydrophobicity, charge and polarity, of essential (e.g., catalytic, binding and/or other activities depending upon the protein) residues. For use in the methods herein, the “Percent Accepted Mutation” values (PAM values; see, Dayhoff et al., Atlas of Protein Sequence and Structure, 5(3):345-352, 1978), FIG. 2) can be used as desribed herein. PAM values, originally developed to produce alignments between protein sequences, are available in the form of probability matrices, which reflect an evolutionary distance. Since, in a family of proteins or homologous (related) sequences, identical or similar amino acids (85% similarity) are shared, conservative substitutions for, or “allowed point mutations” of the corresponding amino acid residues can be determined throughout an aligned reference sequence. As noted, conservative substitutions of a residue in a reference sequence are those substitutions that are physically and functionally similar to the corresponding reference residues e.g., that have a similar size, shape, electric charge, chemical properties,2 including the ability to form bonds such as covalent and hydrogen bonds. For example, conservative substitutions can be those that exhibit the highest scores and fulfill the PAM matrix criteria in the form of “accepted point mutations.”

[0265] By comparing a family of scoring matrices, Dayhoff et al., Atlas of Protein Sequence and Structure, 5(3):345-352, 1978), found consistently higher score significance when using PAM250 matrix to analyze a variety of proteins, known to be distantly related. For methods herein, the PAM250 matrix was selected for use. The PAM250 matrix is used, by learning directly from natural evolution, to find replacing amino acids for the is-HITs to generate conservative mutations without affecting the protein function. By using PAM250, candidate replacing amino acids are identified from related proteins from different organisms.

[0266] An exemplary class of proteins that can be optimized according to the methods provided herein are the cytokines. For example, 2D-scanning methods provided herein can be used to modify the following cytokines to increase their stability as assessed by an increased resistance to proteolysis resulting in an increased protein half-life in the bloodstream or any other desired biological activity of the selected protein. Exemplary cytokines, include, but are not limited to: interleukin-(IL-10; SEQ ID NO: 200), interferon beta (IFNβ; SEQ ID NO: 196), interferon alpha-2a (IFNα-2a; SEQ ID NO: 182), interferon alpha-2b (IFNα-2b; SEQ ID NO: 1), and interferon gamma (IFN-y; SEQ ID NO: 199), granulocyte colony stimulating factor (G-CSF; SEQ ID NO: 210), leukemia inhibitory factor (LIF; SEQ ID NO: 213), growth hormone (hGH; SEQ ID NO: 216), ciliary neurotrophic factor (CNTF; SEQ ID NO: 212), leptin (SEQ ID NO: 211), oncostatin M (SEQ ID NO: 214), interleukin-6 (IL-6; SEQ ID NO: 217), interleukin-12 (IL-12; SEQ ID NO: 215), erythropoietin (EPO; SEQ ID NO: 201), granulocyte-macrophage colony stimulating factor (GM-CSF; SEQ ID NO: 202), interleukin-2 (IL-2; SEQ ID NO: 204), interleukin-3 (IL-3; SEQ ID NO: 205), interleukin-4 (IL-4; SEQ ID NO: 207), interleukin-5 (IL-5; SEQ ID NO: 208), interleukin-13 (IL-13; SEQ ID NO: 209), Flt3 ligand (SEQ ID NO: 203) and stem cell factor (SCF; SEQ ID NO: 206).

[0267] Accordingly, provided herein are modified cytokines that exhibit increased resistance to proteolysis compared to the unmodified cytokine. The modified cytokines can be selected from among a member of the interferons/interleukin-10 protein family, a member of the long-chain cytokine family; and a member of the short-chain cytokine family. In particular embodiments, the modified cytokines provided herein are selected from among: interleukin-10 (IL-10), interferon beta (IFNβ), interferon alpha-2a (IFNα-2a), interferon alpha-2b (IFNα-2b), and interferon gamma (IFN-y), granulocyte colony stimulating factor (G-CSF), leukemia inhibitory factor (LIF), human growth hormone (hGH), ciliary neurotrophic factor (CNTF), leptin, oncostatin M, interleukin-6 (IL-6) and interleukin-12 (IL-12), erythropoietin (EPO), granulocyte-macrophage colony stimulating factor (GM-CSF), interleukin-2 (IL-2), interleukin-3 (IL-3), interleukin-4 (IL-4), interleukin-5 (IL-5), interleukin-13 (IL-13), Flt3 ligand and stem cell factor (SCF). In one embodiment, the modified cytokine is an interferon, including modified interferon α-2b (IFNα-2b).

[0268] E. Rational Evolution of IFNα-2b For Increased Resistance to Proteolysis

[0269] IFNα-2b is used for a variety of applications. Typically it is used for treatment of type B and C chronic hepatitis. Additional indications include, but are not limited to, melanomas, herpes infections, Kaposi sarcomas and some leukemia and lymphoma cases. Patients receiving interferon are subject to frequent repeat applications of the drug. Since such frequent injections generate uncomfortable physiological as well as undesirable psychological reactions in patients, increasing the half-life of interferons and thus decreasing the necessary frequency of interferon injections, would be extremely useful to the medical community. For example, after injection of native human IFNα-2b injection in mice, as a model system, its presence can be detected in the serum between 3 and 10 hours with a half-life of only around 4 hours. The IFNα-2b completely disappears to undetectable levels by 18-24 hours after injection. Provided herein are mutant variants of the IFNα-2b protein that display altered properties including: (a) highly improved stability as assessed by resistance to proteases in vitro and by pharmacokinetics studies in mice; and (b) at least comparable biological activity as assessed by antiviral and antiproliferative action compared to both the unmodified and wild type native IFNα-2b protein and to at least one pegylated derivative of the wild type native IFNα. As a result, the IFNα-2b mutant proteins provided herein confer a higher half-life and at least comparable antiviral and antiproliferation activity (sufficient for a therapeutic effect) with respect to the native sequence and to the pegylated derivatives molecules currently being used for the clinical treatment of hepatitis C infection. See FIGS. 6(A)-6(N), 6(T) and 6(U). Thus, the optimized IFNα-2b protein mutants that possess increased resistance to proteolysis and/or glomerular filtration provided herein result in a decrease in the frequency of injections needed to maintain a sufficient drug level in serum, leading to i) higher comfort and acceptance by patients, ii) lower doses necessary to achieve comparable biological effects, and iii) as a consequence of (ii), an attenuation of the (dose-dependent) secondary effects observed in humans.

[0270] In particular embodiments, the half-life of the IFNα-2b and IFNα-2a mutants provided herein is increased by an amount selected from at least 10%, at least 20%, at least 30%, at least 40%, at least 50%, at least 60%, at least 70%, at least 80%, at least 90%, at least 100%, at least 150%, at least 200%, at least 250%, at least 300%, at least 350%, at least 400%, at least 450%, at least 500% or more, when compared to the half-life of native human IFNα-2b and IFNα-2a in either human blood, human serum or an in vitro mixture containing one or more proteases. In other embodiments, the half-life of the IFNα-2b and IFNα-2a mutants provided herein is increased by an amount selected from at least 6 times, 7 times, 8 times, 9 times, 10 times, 20 times, 30 times, 40 times, 50 times, 60 times, 70 times, 80 times, 90 times, 100 times, 200 times, 300 times, 400 times, 500 times, 600 times, 700 times, 800 times, 900 times, 1000 times, or more, when compared to the half-life of native human IFNα-2b and IFNα-2a in either human blood, human serum or an in vitro mixture containing one or more proteases.

[0271] Two methodologies were used herein to increase the stability of IFNα-2b by amino acid replacement: i) amino acid replacement that leads to higher resistance to proteases by direct destruction of the protease target residue or sequence, while either maintaining or improving the requisite biological activity (e.g., antiviral activity, antiproliferation activity), and/or ii) amino acid replacement that leads to a different pattern of N-glycosylation, thus decreasing both glomerular filtration and sensitivity to proteases, while either improving or maintaining the requisite biological activity (e.g., antiviral activity, antiproliferation activity).

[0272] The 2D-scanning methods provided herein were used to identify the amino acid changes on IFNα-2b that lead to an increase in stability when challenged either with proteases, human blood lysate or human serum. Increasing protein stability to proteases, human blood lysate or human serum, and/or increasing the molecular size is contemplated herein to provide a longer in vivo half-life for the particular protein molecules, and thus to a reduction in the frequency of necessary injections into patients. The biological activities that were measured for the IFNα-2b molecules are i) their capacity to inhibit virus replication when added to permissive cells previously infected with the appropriate virus, and ii) their capacity to stimulate cell proliferation when added to the appropriate cells. Prior to the measurement of biological activity, IFNα-2b molecules were challenged with proteases, human blood lysate or human serum during different incubation times. The biological activity measured, corresponds then to the residual biological activity following exposure to the protease-containing mixtures.

[0273] As set forth above, provided herein are methods for the development of IFNα-2b and IFNα-2a molecules that, while maintaining the requisite biological activity intact, have been rendered less susceptible to digestion by blood proteases and therefore display a longer half-life in blood circulation. In this particular example, the method used included the following specific steps as set forth in Example 2:

[0274] 1) Identifying some or all possible target sites on the protein sequence that are susceptible to digestion by one or more specific proteases (these sites are the is-HITs) and

[0275] 2) Identifying appropriate replacing amino acids, specific for each is-HIT, such that if used to replace one or more of the original amino acids at that specific is-HIT, they can be expected to increase the is-HIT's resistance to digestion by protease while at the same time, keeping the biological activity of the protein unchanged (these replacing amino acids are the “candidate LEADs”).

[0276] As set forth in Example 2, the 3-dimensional structure of IFNα-2b obtained from the NMR structure of IFNα-2a (PDB code 1ITF) was used to select only those residues exposed to solvent from a list of residues along the IFNα-2b and IFNα-2a sequence which can be recognized as a substrate for different enzymes present in the serum. Residue 1 corresponds to the first residue of the mature peptide IFNα-2b encoded by nucleotides 580-1074 of sequence accession No. J00207, SEQ ID NO:1. Using this approach, the following 42 amino acid target positions were identified as is-HITs on IFNα-2b or IFNα-2a, which numbering is that of the mature protein (SEQ ID NO:1 or SEQ ID NO:182, respectively): L3, P4, R12, R13, M16, R22, K23 or R23, F27, L30, K31, R33, E41, K49, E58, K70, E78, K83, Y89, E96, E107, P109, L110, M 111, E113, L117, R120, K121, R125, L128, K131, E132, K133, K134, Y135, P137, M148, R149, E159, L161, R162, K164, and E165. Each of these positions was replaced by residues defined as compatible by the substitution matrix PAM250 while at the same time not generating any new substrates for proteases. For these 42 is-HITs, the residue substitutions determined by PAM250 analysis were as follows:

[0277] R to H, Q

[0278] E to H, Q

[0279] K to Q, T

[0280] L to V, I

[0281] M to I, V

[0282] P to A, S

[0283] Y to I, H.

[0284] 1) Modified IFNα-2b Proteins with Single Amino Acid Substitutions

[0285] Among the mutant proteins provided herein, are mutant IFNα-2b proteins that have increased resistance proteolysis compared to the unmodified, typically wild-type, protein. The mutant IFNα-2b proteins include those selected from among proteins containing more single amino acid replacements in SEQ ID NO:1, corresponding to: L by V at position 3; L by I at position 3; P by S at position 4; P by A at position 4; R by H at position 12; R by Q at position 12; R by H at position 13; R by Q at position 13; M by V at position 16; M by I at position 16; R by H at position 22; R by Q at position 22; R by H at position 23; R by Q at position 23; F by I at position 27; F by V at position 27; L by V at position 30; L by I at position 30; K by Q at position 31; K by T at position 31; R by H at position 33; R by Q at position 33; E by Q at position 41; E by H at position 41; K by Q at position 49; K by T at position 49; E by Q at position 58; E by H at position 58; K by Q at position 70; K by T at position 70; E by Q at position 78; E by H at position 78; K by Q at position 83; K by T at position 83; Y by H at position 89; Y by I at position 89; E by Q at position 96; E by H at position 96; E by Q at position 107; E by H at position 107; P by S at position 109; P by A at position 109; L by V at position 110; L by I at position 110; M by V at position 111; M by I at position 111; E by Q at position 113; E by H at position 113; L by V at position 117; L by I at position 117; R by H at position 120; R by Q at position 120; K by Q at position 121; K by T at position 121; R by H at position 125; R by Q at position 125; L by V at position 128; L by I at position 128; K by Q at position 131; K by T at position 131; E by Q at position 132; E by H at position 132; K by Q at position 133; K by T at position 133; K by Q at position 134; K by T at position 134; Y by H at position 135; Y by I at position 135; P by S at position 137; P by A at position 137; M by V at position 148; M by I at position 148; R by H at position 149; R by Q at position 149; E by Q at position 159; E by H at position 159; L by V at position 161; L by I at position 161; R by H at position 162; R by Q at position 162; K by Q at position 164; K by T at position 164; E by Q at position 165; and E by H at position 165.

[0286] 2) LEAD Identification

[0287] Next the specific replacing amino acids (candidate LEADs) are systematically introduced at every specific is-HIT position to generate a collection containing the corresponding mutant IFNα-2b DNA molecules, as set forth in Example 2. The mutant DNA molecules were used to produce the corresponding mutant IFNα-2b protein molecules by transformation or transfection into the appropriate cells. These protein mutants were assayed for (i) protection against proteolysis, (ii) antiviral and antiproliferation activity in vitro, (iii) pharmacokinetics in mice. Of particular interest are mutations that increase these activities of the IFNα-2b mutant proteins compared to unmodified wild type IFNα-2b protein and to pegylated derivates of the wild type protein. Based on the results obtained from these assays, each individual IFNα-2b variant was assigned a specific activity. Those variant proteins displaying the highest stability and/or resistance to proteolysis were selected as LEADs. The candidate LEADs that possessed at least as much residual antiviral activity following protease treatment as the control, native IFNα-2b, before protease treatment were selected as LEADs. The results are set forth in Table 2 of Example 2.

[0288] Using this method, the following mutants selected as LEADs are provided herein and correspond to the group of proteins containing one or more single amino acid replacements in SEQ ID NO:1, corresponding to: F by V at position 27; R by H at position 33; E by Q at position 41; E by H at position 41; E by Q at position 58; E by H at position 58; E by Q at position 78; E by H at position 78; Y by H at position 89; E by Q at position 107; E by H at position 107; P by A at position 109; L by V at position 110; M by V at position 111; E by Q at position 113; E by H at position 113; L by V at position 117; L by I at position 117; K by Q at position 121; K by T at position 121; R by H at position 125; R by Q at position 125; K by Q at position 133; K by T at position 133; and E by Q at position 159; E by H at position 159. Among these are mutations that can have multiple effects. For exmple, among mutations described herein, are mutations that result in an increase of the IFNα-2b activity as assessed by detecting the requisite biological activity.

[0289] Also provided are IFNα-2b proteins that contain a plurality of mutations based on the LEADs (see, e.g., Tables 6 and 7, EXAMPLE 5, which listscandidate LEADs and LEAD sites), are generated. These IFNα-2b proteins have activity that is further optimized. Examples of such proteins are described in the EXAMPLES. Other combinations of mutations can be prepared and tested as described herein to identify other LEADs of interest, particularly those that have further increased IFNα-2b antiviral activity or further increased resistance to proteolysis.

[0290] Also provided herein are modified IFNα-2b or IFNα-2a cytokines selected from among proteins comprising one or more single amino acid replacements in SEQ ID NOS:1 or 182, corresponding to the replacement of: N by D at position 45 (e.g., SEQ ID NO:978); D by G at position 94 (e.g, SEQ ID NO:979); G by R at position 102 (e.g., SEQ ID NO:980); A by G at position 139 (e.g., SEQ ID NO:981); or any combination thereof. These particular proteins have also been found herein to have increased resistance to proteolysis.

[0291] In another embodiment, IFNα-2b and IFNα-2a proteins that contain a plurality of mutations based on the LEADs (see Tables in the EXAMPLES, listing the candidate LEADs and LEAD sites), are produced to produce IFNα-2b and IFNα-2a proteins that have activity that is further optimized. Examples of such proteins are described herein. Other combinations of mutations can be prepared and tested as described herein to identify other LEADs of interest, particularly those that have further increased IFNα-2b and IFNα-2a antiviral activity or further increased resistance to proteolysis.

[0292] 3) N-glycosylation Site Addition

[0293] In additional embodiments, N-glycosylation sites can be added to increase resistance to proteolysis while maintaining or improving the requisite biological activity. Exemplary N-glycosylation mutants containing duo-amino acid replacements corresponding to the N-X-S or N-X-T consensus sequences are set forth in Example 3. Accordingly, provided herein are IFNα-2b and IFNα-2a mutant proteins having an increased resistance to proteolysis compared to unmodified IFNα-2b and IFNα-2a, selected from among proteins comprising one or more sets of duo-amino acid replacements in SEQ ID NO:1, corresponding to:

[0294] D by N at position 2 and P by S at position 4;

[0295] D by N at position 2 and P by T at position 4;

[0296] L by N at position 3 and Q by S at position 5;

[0297] L by N at position 3 and Q by T at position 5;

[0298] P by N at position 4 and T by S at position 6;

[0299] P by N at position 4 and T by T at position 6;

[0300] Q by N at position 5 and H by S at position 7;

[0301] Q by N at position 5 and H by T at position 7;

[0302] T by N at position 6 and S by S at position 8;

[0303] T by N at position 6 and S by T at position 8;

[0304] H by N at position 7 and L by S at position 9;

[0305] H by N at position 7 and L by T at position 9;

[0306] S by N at position 8 and G by S at position 10;

[0307] S by N at position 8 and G by T at position 10;

[0308] L by N at position 9 and S by S at position 11;

[0309] L by N at position 9 and S by T at position 11;

[0310] M by N at position 21 and K by S at position 23;

[0311] M by N at position 21 and K by T at position 23;

[0312] R by N at position 22 and I by S at position 24;

[0313] R by N at position 22 and I by T at position 24;

[0314] K or R by N at position 23 and S by S at position 25;

[0315] K or R by N at position 23 and S by T at position 25;

[0316] I by N at position 24 and L by S at position 26;

[0317] I by N at position 24 and L by T at position 26;

[0318] S by N at position 25 and F by S at position 27;

[0319] S by N at position 25 and F by T at position 27;

[0320] L by N at position 26 and S by S at position 28;

[0321] L by N at position 26 and S by T at position 28;

[0322] S by N at position 28 and L by S at position 30;

[0323] S by N at position 28 and L by T at position 30;

[0324] L by N at position 30 and D by S at position 32;

[0325] L by N at position 30 and D by T at position 32;

[0326] K by N at position 31 and R by S at position 33;

[0327] K by N at position 31 and R by T at position 33;

[0328] D by N at position 32 and H by S at position 34;

[0329] D by N at position 32 and H by T at position 34;

[0330] R by N at position 33 and D by S at position 35;

[0331] R by N at position 33 and D by T at position 35;

[0332] H by N at position 34 and F by S at position 36;

[0333] H by N at position 34 and F by T at position 36;

[0334] D by N at position 35 and G by S at position 37;

[0335] D by N at position 35 and G by T at position 37;

[0336] F by N at position 36 and F by S at position 38;

[0337] F by N at position 36 and F by T at position 38;

[0338] G by N at position 37 and P by S at position 39;

[0339] G by N at position 37 and P by T at position 39;

[0340] F by N at position 38 and Q by S at position 40;

[0341] F by N at position 38 and Q by T at position 40;

[0342] P by N at position 39 and E by S at position 41;

[0343] P by N at position 39 and E by T at position 41;

[0344] Q by N at position 40 and E by S at position 42;

[0345] Q by N at position 40 and E by T at position 42;

[0346] E by N at position 41 and F by S at position 43;

[0347] E by N at position 41 and F by T at position 43;

[0348] E by N at position 42 and G by S at position 44;

[0349] E by N at position 42 and G by T at position 44;

[0350] F by N at position 43 and N by S at position 45;

[0351] F by N at position 43 and N by T at position 45;

[0352] G by N at position 44 and Q by S at position 46;

[0353] G by N at position 44 and Q by T at position 46;

[0354] N by N at position 45 and F by S at position 47;

[0355] N by N at position 45 and F by T at position 47;

[0356] Q by N at position 46 and Q by S at position 48;

[0357] Q by N at position 46 and Q by T at position 48;

[0358] F by N at position 47 and K by S at position 49;

[0359] F by N at position 47 and K by T at position 49;

[0360] Q by N at position 48 and A by S at position 50;

[0361] Q by N at position 48 and A by T at position 50;

[0362] K by N at position 49 and E by S at position 51;

[0363] K by N at position 49 and E by T at position 51;

[0364] A by N at position 50 and T by S at position 52;

[0365] A by N at position 50 and T by T at position 52;

[0366] S by N at position 68 and K by S at position 70;

[0367] S by N at position 68 and K by T at position 70;

[0368] K by N at position 70 and S by S at position 72;

[0369] K by N at position 70 and S by T at position 72;

[0370] A by N at position 75 and D by S at position 77;

[0371] A by N at position 75 and D by T at position 77;

[0372] D by N at position 77 and T by S at position 79;

[0373] D by N at position 77 and T by T at position 79;

[0374] I by N at position 100 and G by S at position 102;

[0375] I by N at position 100 and G by T at position 102;

[0376] Q by N at position 101 and V by S at position 103;

[0377] Q by N at position 101 and V by T at position 103;

[0378] G by N at position 102 and G by S at position 104;

[0379] G by N at position 102 and G by T at position 104;

[0380] V by N at position 103 and V by S at position 105;

[0381] V by N at position 103 and V by T at position 105;

[0382] G by N at position 104 and T by S at position 106;

[0383] G by N at position 104 and T by T at position 106;

[0384] V by N at position 105 and E by S at position 107;

[0385] V by N at position 105 and E by T at position 107;

[0386] T by N at position 106 and T by S at position 108;

[0387] T by N at position 106 and T by T at position 108;

[0388] E by N at position 107 and P by S at position 109;

[0389] E by N at position 107 and P by T at position 109;

[0390] T by N at position 108 and I by S at position 110;

[0391] T by N at position 108 and I by T at position 110;

[0392] K by N at position 134 and S by S at position 136;

[0393] K by N at position 134 and S by T at position 136;

[0394] S by N at position 154 and N by S at position 156;

[0395] S by N at position 154 and N by T at position 156;

[0396] T by N at position 155 and L by S at position 157;

[0397] T by N at position 155 and L by T at position 157;

[0398] N by N at position 156 and Q by S at position 158;

[0399] N by N at position 156 and Q by T at position 158;

[0400] L by N at position 157 and E by S at position 159;

[0401] L by N at position 157 and E by T at position 159;

[0402] Q by N at position 158 and S by S at position 160;

[0403] Q by N at position 158 and S by T at position 160;

[0404] E by N at position 159 and L by S at position 161;

[0405] E by N at position 159 and L by T at position 161;

[0406] S by N at position 160 and R by S at position 162;

[0407] S by N at position 160 and R by T at position 162;

[0408] L by N at position 161 and S by S at position 163;

[0409] L by N at position 161 and S by T at position 163;

[0410] R by N at position 162 and K by S at position 164;

[0411] R by N at position 162 and K by T at position 164;

[0412] S by N at position 163 and E by S at position 165; and

[0413] S by N at position 163 and E by T at position 165,

[0414] where residue 1 corresponds to residue 1 of the mature IFNα-2b or IFNα-2a protein set forth in SEQ ID NO:1 or SEQ ID NO:182, respectively. In particular embodiments, the IFNα-2b or IFNα-2a mutant protein has increased resistance to proteolysis compared to unmodified IFNα-2b or IFNα-2a, and is selected from among proteins comprising one or more sets of duo-amino acid replacements in SEQ ID NO:1, corresponding to:

[0415] Q by N at position 5 and H by S at position 7;

[0416] P by N at position 39 and E by S at position 41;

[0417] P by N at position 39 and E by T at position 41;

[0418] Q by N at position 40 and E by S at position 42;

[0419] Q by N at position 40 and E by T at position 42;

[0420] E by N at position 41 and F by S at position 43;

[0421] E by N at position 41 and F by T at position 43;

[0422] F by N at position 43 and N by S at position 45;

[0423] G by N at position 44 and Q by T at position 46;

[0424] N by N at position 45 and F by S at position 47;

[0425] N by N at position 45 and F by T at position 47;

[0426] Q by N at position 46 and Q by S at position 48;

[0427] F by N at position 47 and K by S at position 49;

[0428] F by N at position 47 and K by T at position 49;

[0429] I by N at position 100 and G by S at position 102;

[0430] I by N at position 100 and G by T at position 102;

[0431] V by N at position 105 and E by S at position 107;

[0432] V by N at position 105 and E by T at position 107;

[0433] T by N at position 106 and T by S at position 108;

[0434] T by N at position 106 and T by T at position 108;

[0435] E by N at position 107 and P by S at position 109;

[0436] E by N at position 107 and P by T at position 109;

[0437] L by N at position 157 and E by S at position 159;

[0438] L by N at position 157 and E by T at position 159;

[0439] E by N at position 159 and L by S at position 161; and

[0440] E by N at position 159 and L by T at position 161.

[0441] F. Protein Redesign

[0442] Provided herein are methods for designing and generating new versions of native or modified cytokines, such as IFNα-2b and IFNα-2a. Using these methods, the redesigned cytokine maintains either sufficient, typically equal or improved levels of a selected phenotype, such as a biological activity, of the original protein, while at the same time its amino acid sequence is changed by replacement of up to: at least 1%, at least 2%, at least 3%, at least 4%, at least 5%, at least 6%, at least 7%, at least 8%, at least 9%, at least 10%, at least 12%, at least 14%, at least 16%, at least 18%, at least 20%, at least 30%, at least 40% up to 50% or more of its native amino acids by the appropriate pseudo-wild type amino acids. Pseudo-wild type amino acids are those amino acids such that when they replace an original, such as native, amino acid at a given position on the protein sequence, the resulting protein displays substantially the same levels of biological activity (or sufficient activity for its therapeutic or other use) compared to the original, such as native, protein. In other embodiments, pseudo-wild type amino acids are those amino acids such that when they replace an original, such as native, amino acid at a given position on the protein sequence, the resulting protein displays the same phenotype, such as levels of biological activity, compared to an original, typically a native, protein. Pseudo-wild type amino acids and the appropriate replacing positions can be detected and identified by any analytical or predictive means; such as for example, by performing an Alanine-scanning. Any other amino acid, particularly another amino acid that has a neutral effect on structure, such as Gly or Ser, also can be used for the scan. All those replacements of original, such as native, amino acids by Ala that do not lead to the generation of a HIT (a protein that has lost the desired biological activity), have either led to the generation of a LEAD (a protein with increased biological activity); or the replacement by Ala will be a neutral replacement, i.e., the resulting protein will display comparable levels of biological activity compared to the original, such as native, protein. The methods provided herein for protein redesign of cytokines, such as IFNα-2b and IFNα-2a, are intended to design and generate “artificial” (versus naturally existing) proteins, such that they consist of amino acid sequences not existing in Nature, but that display biological activities characteristic of the original, such as native, protein. These redesigned proteins are contemplated herein to be useful for avoiding potential side effects that might otherwise exist in other forms of cytokines in treatment of disease. Other uses of redesigned proteins provided herein are to establish cross-talk between pathways triggered by different proteins; to facilitate structural biology by generating mutants that can be crystallized while maintaining activity; and to destroy an activity of a protein without changing a second activity or multiple additional activities.

[0443] In one embodiment, a method for obtaining redesigned proteins includes i) identifying some or all possible target sites on the protein sequence that are susceptible to amino acid replacement without losing protein activity (protein activity in a largest sense of the term: enzymatic, binding, hormone, etc.) (These sites are the pseudo-wild type, Ψ-wt sites); ii) identifying appropriate replacing amino acids (Ψ-wt amino acids), specific for each Ψ-wt site, such that if used to replace the native amino acids at that specific Ψ-wt site, they can be expected to generate a protein with comparable biological activity compared to the original, such as native, protein, thus keeping the biological activity of the protein substantially unchanged; iii) systematically introducing the specific Ψ-wt amino acids at every specific Ψ-wt position so as to generate a collection containing the corresponding mutant molecules. Mutants are generated, produced and phenotypically characterized one-by-one, in addressable arrays, such that each mutant molecule contains initially amino acid replacements at only one Ψ-wt site. In subsequent rounds mutant molecules also can be generated such that they contain one or more Ψ-wt amino acids at one or more Ψ-wt sites. Those mutant proteins carrying several mutations at a number of Ψ-wt sites, and that display comparable or improved biological activity are called redesigned proteins or Ψ-wt proteins. In particular embodiments, at least 1%, at least 2%, at least 3%, at least 4%, at least 5%, at least 6%, at least 7%, at least 8%, at least 9%, at least 10%, at least 15%, at least 20%, at least 25%, or more of the amino acid residue positions on a particular cytokine, such as IFNα-2b and IFNα-2a are replaced with an appropriate pseudo-wild type amino acid.

[0444] The first step is an amino acid scan over the full length of the protein. At this step, each and every one of the amino acids in the protein sequence is replaced by a selected reference amino acid, such as alanine. This permits the identification of “redesign-HIT” positions, i.e., positions that are sensitive to amino acid replacement. All of the other positions that are not redesign-HIT positions (i.e., those at which the replacement of the original, such as native, amino acid by the replacing amino acid, for example Ala, does not lead to a drop in protein fitness or biological activity) are referred to herein as “pseudo-wild type” positions. When the replacing amino acid, for example Ala, replaces the original, such as native, amino acid at a non-HIT position, then the replacement is neutral, in terms of protein activity, and the replacing amino acid is said to be a pseudo-wild type amino acid at that position. Pseudo-wild type positions appear to be less sensitive than redesign-HIT positions since they tolerate the amino acid replacement without affecting the protein activity that is being either maintained or improved. Amino acid replacement at the pseudo-wild type positions, result in a non-change in the protein fitness (e.g., possess substantially the same biological activity), while at the same time to a divergence in the resulting protein sequence compared to the original, such as native, sequence.

[0445] To first identify those amino acid positions on the IFNα-2b and IFNα-2a protein that are involved or not involved in IFNα-2b and IFNα-2a protein activity, such as binding activity of IFNα-2b and IFNα-2a to its receptor, an Ala-scan was performed on the IFNα-2b sequence as set forth in Example 4. For this purpose, each amino acid in the IFNα-2b protein sequence was individually changed to Alanine. Any other amino acid, particularly another amino acid that has a neutral effect on structure, such as Gly or Ser, also can be used. Each resulting mutant IFNα-2b protein was then expressed and the activity of the interferon molecule was then assayed. These particular amino acid positions, referred to herein as HITs would in principle not be suitable targets for amino acid replacement to increase protein stability, because of their involvement in the recognition of IFN-receptor or in the downstream pathways involved in IFN activity. For the Ala-scanning, the biological activity measured for the IFNα-2b molecules was: i) their capacity to inhibit virus replication when added to permissive cells previously infected with the appropriate virus and, ii) their capacity to stimulate cell proliferation when added to the appropriate cells. The relative activity of each individual mutant compared to the native protein is indicated in FIGS. 10A through C. HITs are those mutants that produce a decrease in the activity of the protein (in the example: all the mutants with activities below about 30% of the native activity.

[0446] In addition, the Alanine-scan was used to identify the amino acid residues on IFNα-2b that when replaced with alanine correspond to ‘pseudo-wild type’ activity, i.e., those that can be replaced by alanine without leading to a decrease in biological activity. Knowledge of these amino acids is useful for the re-design of the IFNα-2b and IFNα-2a proteins. The results are set forth in Table 5, and include pseudo-wild type amino acid positions of IFNα-2b corresponding to SEQ ID NO:1, amino acid residues: 9, 10, 17, 20, 24, 25, 35, 37, 41, 52, 54, 56, 57, 58, 60, 63, 64, 65, 76, 89, and 90.

[0447] Accordingly, provided herein are IFNα-2b and IFNα-2a mutant proteins comprising one or more pseudo-wild type mutations at amino acid positions of IFNα-2b or IFNα-2a corresponding to SEQ ID NO:1 or SEQ ID NO:182, respectively, amino acid residues: 9, 10, 17, 20, 24, 25, 35, 37, 41, 52, 54, 56, 57, 58, 60, 63, 64, 65, 76, 89, and 90. The mutations can be either one or more of insertions, deletions and/or replacements of the native amino acid residue(s). In one embodiment, the pseudo-wild type replacements are mutations with alanine at each position. In another embodiment, the pseudo-wild type replacements are one or more mutations in SEQ ID NO:1 corresponding to:

[0448] L by A at position 9, L by A at position 17,

[0449] Q by A at position 20, I by A at position 24,

[0450] S by A at position 25, D by A at position 35,

[0451] G by A at position 37, E by A at position 41,

[0452] T by A at position 52, P by A at position 54,

[0453] L by A at position 56, H by A at position 57,

[0454] E by A at position 58, I by A at position 60,

[0455] I by A at position 63, F by A at position 64,

[0456] N by A at position 65, W by A at position 76,

[0457] Y by A at position 89, and Q by A at position 90.

[0458] In addition, the IFNα-2b alanine scan revealed the following redesign-HITs having decreased antiviral activity at amino acid positions of IFNα-2b corresponding to SEQ ID NO:1, amino acid residues: 2, 7, 8, 11, 13, 15, 16, 23, 26, 28, 29, 30, 31, 32, 33, 53, 69, 91, 93, 98, and 101. Accordingly, in particular embodiments where it is desired to decrease the viral activity of IFNα-2b or IFNα-2a, either one or more of insertions, deletions and/or replacements of the native amino acid residue(s) can be carried out at one or more of amino acid positions of IFNα-2b or IFNα-2a corresponding to SEQ ID NO:1, amino acid residues: 2, 7, 8, 11, 13, 15, 16, 23, 26, 28, 29, 30, 31, 32, 33, 53, 69, 91, 93, 98, and 101.

[0459] Each of the redesign mutations set forth above can be combined with one or more of the IFNα-2b or IFNα-2a candidate LEAD mutations or one or more of the IFNα-2b or IFNα-2a LEAD mutants provided herein.

[0460] G. 3D-scanning and Its Use for Modifying Cytokines

[0461] Also provided herein is a method of structural homology analysis for comparing proteins regardless of their underlying amino acid sequences. For a subset of proteins families, such as the family of human cytokines, this information is rationally exploited to produce modified proteins. This method of structural homology analysis can be applied to proteins that are evolved by any method, including the 2D scanning method described herein. When used with the 2D method in which a particular phenotype, activity or characteristic of a protein is modified by 2D analysis, the method is referred to as 3D-scanning.

[0462] The use of “structural homology” analysis in combination with the directed evolution methods provided herein provides a powerful technique for identifying and producing various new protein mutants, such as cytokines, having desired biological activities, such as increased resistance to proteolysis. For example, the analysis of the “structural homology” between an optimized mutant version of a given protein and “structurally homologous” proteins allows identification of the corresponding structurally related or structurally similar amino acid positions (also referred to herein as “structurally homologous loci”) on other proteins. This permits identification of mutant versions of the latter that have a desired optimized feature(s) (biological activity, phenotype) in a simple, rapid and predictive manner (regardless of amino acid sequence and sequence homology). Once a mutant version of a protein is developed, then, by applying the rules of structural homology, the corresponding structurally related amino acid positions (and replacing amino acids) on other “structurally homologous” proteins readily are identified, thus allowing a rapid and predictive discovery of the appropriate mutant versions for the new proteins.

[0463] 3-dimensionally structurally equivalent or similar amino acid positions that are located on two or more different protein sequences that share a certain degree of structural homology, have comparable functional tasks (activities and phenotypes). These two amino acids that occupy substantially equivalent 3-dimensional structural space within their respective proteins than can be said to be “structurally similar” or “structurally related” with each other, even if their precise positions on the amino acid sequences, when these sequences are aligned, do not match with each other. The two amino acids also are said to occupy “structurally homologous loci.” “Structural homology” does not take into account the underlying amino acid sequence and solely compares 3-dimensional structures of proteins. Thus, two proteins can be said to have some degree of structural homology whenever they share conformational regions or domains showing comparable structures or shapes with 3-dimensional overlapping in space. Two proteins can be said to have a higher degree of structural homology whenever they share a higher amount of conformational regions or domains showing comparable structures or shapes with 3-dimensional overlapping in space. Amino acids positions on one or more proteins that are “structurally homologous” can be relatively far way from each other in the protein sequences, when these sequences are aligned following the rules of primary sequence homology. Thus, when two or more protein backbones are determined to be structurally homologous, the amino acid residues that are coincident upon three-dimensional structural superposition are referred to as “structurally similar” or “structurally related” amino acid residues in structurally homologous proteins (also referred to as “structurally homologous loci”). Structurally similar amino acid residues are located in substantially equivalent spatial positions in structurally homologous proteins.

[0464] For example, for proteins of average size (approximately 180 residues), two structures with a similar fold will usually display rms deviations not exceeding 3 to 4 angstroms. For example, structurally similar or structurally related amino acid residues can have backbone positions less than 3.5, 3.0, 2.5, 2.0, 1.7 or 1.5 angstrom from each other upon protein superposition. RMS deviation calculations and protein superposition can be carried out using any of a number of methods known in the art. For example, protein superposition and RMS deviation calculations can be carried out using all peptide backbone atoms (e.g., N, C, C(C═O), O and CA (when present)). As another example, protein superposition can be carried out using just one or any combination of peptide backbone atoms, such as, for example, N, C, C(C═O), O and CA (when present). In addition, one skilled in the art will recognize that protein superposition and RMS deviation calculations generally can be performed on only a subset of the entire protein structure. For example, if the protein superposition is carried out using one protein that has many more amino acid residues than another protein, protein superposition can be carried out on the subset (e.g., a domain) of the larger protein that adopts a structure similar to the smaller protein. Similarly, only portions of other proteins can be suitable for superimposition. For example, if the position of the C-terminal residues from two structurally homologous proteins differ significantly, the C-terminal residues can be omitted from the structural superposition or RMS deviation calculations.

[0465] Accordingly, provided herein are methods of rational evolution of proteins based on the identification of potential target sites for mutagenesis (is-HITs) through comparison of patterns of protein backbone folding between structurally related proteins, irrespective of the underlying sequences of the compared proteins. Once the structurally related amino acid positions are identified on the new protein, then suitable amino acid replacement criteria, such as PAM analysis, can be employed to identify candidate LEADs for construction and screening as described herein.

[0466] For example, analysis of “structural homology” between and among a number of related cytokines was used to identify on various members of the cytokine family, other than interferon alpha, those amino acid positions and residues that are structurally similar or structurally related to those found in the IFNα-2b mutants provided herein that have been optimized for improved stability. The resulting modified cytokines are provided. This method can be applied to any desired phenotype using any protein, such as a cytokine, as the starting material to which an evolution procedure, such as the rational directed evolution procedure of U.S. application Ser. No. 10/022,249 or the 2-dimensional scanning method provided herein, is applied. The structurally corresponding residues are then altered on members of the family to produce additional cytokines with similar phenotypic alterations.

[0467] 1) Homology

[0468] Typically, homology between proteins is compared at the level of their amino acid sequences, based on the percent or level of coincidence of individual amino acids, amino acid per amino acid, when sequences are aligned starting from a reference, generally the residue encoded by the start codon. For example, two proteins are said to be “homologous” or to bear some degree of homology whenever their respective amino acid sequences show a certain degree of matching upon alignment comparison. Comparative molecular biology is primarily based on this approach. From the degree of homology or coincidence between amino acid sequences, conclusions can be made on the evolutionary distance between or among two or more protein sequences and biological systems.

[0469] The concept of “convergent evolution” is applied to describe the phenomena by which phylogenetically unrelated organisms or biological systems have evolved to share features related to their anatomy, physiology and structure as a response to common forces, constraints, and evolutionary demands from the surrounding environment and living organisms. Alternatively, “divergent evolution,” is applied to describe the phenomena by which strongly phylogenetically related organisms or biological systems have evolved to diverge from identity or similarity as a response to divergent forces, constraints, and evolutionary demands from the surrounding environment and living organisms.

[0470] In the typical traditional analysis of homologous proteins there are two conceptual biases corresponding to: i) “convergent evolution,” and ii) “divergent evolution.” Whenever the aligned amino acid sequences of two proteins do not match well with each other, these proteins are considered “not related” or “less related” with each other and have different phylogenetic origins. There is no (or low) homology between these proteins and their respective genes are not homologous (or show little homology). If these two “non-homologous” proteins under study share some common functional features (e.g., interaction with other specific molecules, activity), they are determined to have arisen by “convergent evolution,” i.e., by evolution of their non-homologous amino acid sequences, in such a way that they end up generating functionally “related” structures.

[0471] On the other hand, whenever the aligned amino acid sequences of two proteins do match with each other to a certain degree, these proteins are considered to be “related” and to share a common phylogenetic origin. A given degree of homology is assigned between these two proteins and their respective genes likewise share a corresponding degree of homology. During the evolution of their initial highly homologous amino acid sequence, enough changes can be accumulated in such a way that they end up generating “less-related” sequences and less related function. The divergence from perfect matching between these two “homologous” proteins under study is said come from “divergent evolution.”

[0472] 2) 3D-Scanning (Structural Homology) Methods

[0473] Structural homology refers to homology between the topology and three-dimensional structure of two proteins. Structural homology is not necessarily related to “convergent evolution” or to “divergent evolution,” nor is it related to the underlying amino acid sequence. Rather, structural homology is likely driven (through natural evolution) by the need of a protein to fit specific conformational demands imposed by its environment. Particular structurally homologous “spots” or “loci” would not be allowed to structurally diverge from the original structure, even when its own underlying sequence does diverge. This structural homology is exploited herein to identify loci for mutation.

[0474] Within the amino acid sequence of a protein resides the appropriate biochemical and structural signals to achieve a specific spatial folding in either an independent or a chaperon-assisted manner. Indeed, this specific spatial folding ultimately determines protein traits and activity. Proteins interact with other proteins and molecules in general through their specific topologies and spatial conformations. In principle, these interactions are not based solely on the precise amino acid sequence underlying the involved topology or conformation. If protein traits, activity (behavior and phenotypes) and interactions rely on protein topology and conformation, then evolutionary forces and constraints acting on proteins can be expected to act on topology and conformation. Proteins sharing similar functions will share comparable characteristics in their topology and conformation, despite the underlying amino acid sequences that create those topologies and conformations.

[0475] 3) Application of 3D Scanning to Cytokines

[0476] The method based on structural homology, including the 3D-scanning method provided herein can be applied to any related proteins.

[0477] For exemplary purposes herein it is applied to cytokines. In exemplary embodiments, methods for altering phenotypes of members of families of cytokines by altering one member such as by employing the 2-dimensional rational scanning method are provided. As provided herein, other members of these cytokine families then can be similarly modified by identifying and changing structurally homologous residues to similarly alter the phenotypes of such proteins.

[0478] In an exemplary embodiment herein, IFNα-2b mutants with increased resistance to proteolysis are generated by the 2-dimensional rational scanning method; IFNβ mutants also were generated. The corresponding residues on members of cytokine families that possess structural homology to IFNα-2b were identified and the identifeid residues on the other cytokines were similarly modified to produce cytokines with increased resistance to proteolysis. Hence also provided herein are cytokine mutants that display increased resistance to proteolysis and/or glomerular filtration containing one or more amino acid replacements.

[0479] Provided herein are mutant (modified) cytokines that display altered features and properties, such as a resistance to proteolysis. Methods for producing such modified cytokines also are provided.

[0480] Also provided herein is a method of structural homology analysis for comparing proteins regardless their underlying amino acid sequences. For a subset of proteins families, such as the family of human cytokines, this information is rationally exploited herein. Human cytokines all share a common helix bundle fold, which is used to structurally define the 4-helical cytokine superfamily in the structural classification of the protein database SCOP® (Structural Classification of Proteins; see, e.g., Murzin et al., J. Mol. Biol., 247:536-540, 1995 and “http://scop.mrc-lmb.cam.ac.uk/scop/”). This superfamily includes three different families: 1) the interferons/interleukin-10 protein family (SEQ ID NOS: 1 and 182-200); 2) the long-chain cytokine family (SEQ ID NOS: 210-217); and 3) the short-chain cytokine family (SEQ ID NOS: 201-209).

[0481] For example, a distinct feature of cytokines from the interferons/interleukin-10 family is an additional (fifth) helix. This family includes interleukin-10 (IL-10; SEQ ID NO:200, interferon beta (IFNβ; SEQ ID NO: 196), interferon alpha-2a (IFNα-2a; SEQ ID NO: 182), interferon alpha-2b (IFNα-2b; SEQ ID NO:1), and interferon gamma (IFN-y; SEQ ID NO: 199). The long-chain cytokine protein family includes, among others, granulocyte colony stimulating factor (G-CSF; SEQ ID NO: 210), leukemia inhibitory factor (LIF; SEQ ID NO: 213), growth hormone (hGH; SEQ ID NO: 216), ciliary neurotrophic factor (CNTF; SEQ ID NO: 212), leptin (SEQ ID NO: 211), oncostatin M (SEQ ID NO: 214), interleukin-6 (IL-6; SEQ ID NO: 217) and interleukin-12 (IL-12; SEQ ID NO: 215). The short-chain cytokine protein family includes, among others, erythropoietin (EPO; SEQ ID NO: 201), granulocyte-macrophage colony stimulating factor (GM-CSF; SEQ ID NO: 202), interleukin-2 (IL-2; SEQ ID NO: 204), interleukin-3 (IL-3; SEQ ID NO: 205), interleukin-4 (IL-4; SEQ ID NO: 207), interleukin-5 (IL-5; SEQ ID NO: 208), interleukin-13 (IL-13; SEQ ID NO: 209), Flt3 ligand (SEQ ID NO: 203) and stem cell factor (SCF; SEQ ID NO: 206).

[0482] Although the degree of similarity among the underlying amino acid sequences of these cytokines does not appear high, their corresponding 3-dimensional structures present a high level of similarity (see, e.g., FIGS. 8B through D). Effectively, the best structural similarity is obtained between two 3-dimensional protein structures of the same family in the 4-helical cytokine superfamily.

[0483] The methods provided herein for producing mutant cytokines are exemplified with reference to production of cytokines that display a substantially equivalent increase in resistance to proteolysis relative to the optimized IFNα-2b mutants. It is understood that this method can be applied to other families of proteins and for other phenotypes.

[0484] In one embodiment, proteins of the 4-helical cytokine superfamily are provided herein that are structurally homologous IFNα-2b LEAD mutants set forth herein. For example, by virtue of the knowledge of the 3-dimensional structural amino acid positions within the LEAD IFNα-2b mutants provided herein that confer higher resistance to a challenge with either proteases or blood lysate or serum, while maintaining or improving the requisite biological activity, the corresponding structurally related (e.g., structurally similar) amino acid residues on a variety of other cytokines are identified (FIG. 9).

[0485] Numerous methods are well known in the art for identifying structurally related amino acid positions with 3-dimensionally structurally homologous proteins. Exemplary methods include, but are not limited to: CATH (Class, Architecture, Topology and Homologous superfamily) which is a hierarchical classification of protein domain structures based on four different levels (Orengo et al., Structure, 5(8): 1093-1108, 1997); CE (Combinatorial Extension of the optimal path), which is a method that calculates pairwise structure alignments (Shindyalov et al., Protein Engineering, 11 (9):739-747, 1998); FSSP (Fold classification based on Structure-Structure alignment of Proteins), which is a database based on the complete comparison of all 3-dimensional protein structures that currently reside in the Protein Data Bank (PDB) (Holm et al., Science, 273:595-602, 1996); SCOP (Structural Classification of Proteins), which provides a descriptive database based on the structural and evolutionary relationships between all proteins whose structure is known (Murzin et al., J. Mol. Biol., 247:536-540, 1995); and VAST (Vector Alignment Search Tool), which compares newly determined 3-dimensional protein structure coordinates to those found in the MMDB/PDB database (Gibrat et al., Current Opinion in Structural Biology, 6:377-385, 1995).

[0486] In an exemplary embodiment, the step-by-step process including the use of a program referred to as TOP (see FIG. 8A and Lu, G., J. Appl. Cryst., 33:176-189, 2000; publicly available, for example, at bioinfol.mbfys.lu.se/TOP is used for protein structure comparison. This program runs two steps for each protein structure comparison. In the first step topology of secondary structure in the two structures is compared. The program uses two points to represent each secondary structure element (alpha helices or beta strands) then systematically searches all the possible super-positions of these elements in 3-dimensional space (defined as the root mean square deviation—rmsd, the angle between the two lines formed by the two points and the line-line distance). The program searches to determine whether additional secondary structure elements can fit by the same superposition operation. If secondary structures that can fit each other exceed a given number, the program identifies the two structures as similar. The program gives as an output a comparison score called “Structural Diversity” that considers the distance between matched α-carbon atoms and the number of matched residues. The lower the “Structural Diversity” score, the more the two structures are similar. In various embodiments herein, the Structural Diversity scores range from 0 up to about 67.

[0487] In the exemplified embodiment, all the cytokines were first structurally aligned against the IFNα-2b structure. For the proteins within the same family as IFNα-2b (e.g., the interferons/interleukin-10 cytokine family), this alignment was directly used to identify the structurally related is-HIT target amino acid positions and/or regions corresponding to the structurally homologous positions and/or regions on IFNα-2b where LEAD mutants were found (FIG. 8B). For the other cytokines, the protein of the family (either long- or short-chain cytokines) with the best 3-dimensional structural alignment with IFNα-2b was selected using the lowest “Structural Diversity” score as the representative for that family. From the short-chain cytokine protein family, erythropoietin (EPO; see FIG. 8C) was identified as the best structural homologue of IFNα-2b (rmsd=1.9 angstroms; number of aligned residues=62; Structural Diversity=13.8). From the long-chain cytokine protein family, granulocyte-colony stimulating factor (G-CSF; see FIG. 8D) was identified as the best structural homologue of IFNα-2b (rmsd=1.7 angstroms; number of aligned residues=77; Structural Diversity=7.8).

[0488] Next, the amino acid positions and/or regions corresponding to the LEAD mutant regions on IFNα-2b were identified on these two proteins. These two best structural homologues of IFNα-2b (e.g., EPO and G-CSF; see FIGS. 12L and 12E, respectively) were structurally aligned to each of the other cytokines within their respective cytokine protein families. As a result, protein regions likely to be targets for serum protease resistance were identified on all cytokines (see FIGS. 12A through T). Amino acids in these target regions were then checked for their exposure to the solvent and their susceptibility to be protease substrate. Exposed and substrate residues are then subjected to PAM250 analysis as set forth above, so that a group of non-substrate and functionally conservative amino acid residues are selected as replacements. The results of the above structural homology analysis for each of the cytokines provided herein are set forth in FIGS. 12A through T.

[0489] Accordingly, provided herein are modified cytokines that exhibit greater resistance to proteolysis compared to the unmodified cytokine protein, comprising one or more amino acid replacements at one or more target positions on the cytokine corresponding to a structurally-related modified amino acid position within the 3-dimensional structure of an IFNα-2b modified protein provided herein. The resistance to proteolysis can be measured by mixing it with a protease in vitro, incubation with blood or incubation with serum. Also provided herein are cytokine structural homologues of an IFNα-2b modified protein provided herein, comprising one or more amino acid replacements in the cytokine structural homologue at positions corresponding to the 3-dimensional-structurally-similar modified positions within the 3-dimensional structure of the modified IFNα-2b. In one embodiment, the cytokine homologue has increased resistance to proteolysis compared to its unmodified and/or wild type cytokine counterpart. Resistance to proteolysis can be measured by mixture with a protease in vitro, incubation with blood, or incubation with serum.

[0490] a) Structurally Homologous Interferon Mutants

[0491] Also provided herein are modified cytokines or cytokine structural homologues of IFNα-2b that are IFNα cytokines. These IFNα cytokines include, but are not limited to, IFNα-2a, IFNα-c, IFNα-2c, IFNα-d, IFNα-5, IFNα-6, IFNα-4, IFNα-4b, IFNα-I, IFNα-J, IFNα-H, IFNα-F, IFNα-8 and IFNα-consensus cytokine (see, SEQ ID No. 232). Accordingly, amont the the modified IFNα cytokines provided herein are those with one or more amino acid replacements at one or more target positions in either IFNα-2a, IFNα-c, IFNα-2c, IFNα-d, IFNα-5, IFNα-6, IFNα-4, IFNα-4b, IFNα-I, IFNα-J, IFNα-H, IFNα-F, IFNα-8, or IFNα-consensus cytokine corresponding to a structurally-related modified amino acid position within the 3-dimensional structure of the IFNα-2b modified proteins provided herein The replacements lead to greater resistance to proteases, as assessed by incubation with a protease or a with a blood lysate or by incubation with serum, compared to the unmodified IFN alpha-2a.

[0492] In particular embodiments, the modified IFNα cytokines are selected from among:

[0493] the modified IFNα-2a that is human and is selected from among proteins comprising one or more single amino acid replacements in SEQ ID NO: 182, corresponding to amino acid positions: 41, 58, 78, 107, 117, 125, 133 and 159;

[0494] the modified IFNα-c that is human and is selected from among proteins comprising one or more single amino acid replacements in SEQ ID NO: 183, corresponding to amino acid positions: 41, 59, 79, 108, 118, 126, 134and 160;

[0495] the modified IFNα-2c cytokine that is human and is selected from among cytokines comprising one or more single amino acid replacements in SEQ ID NO: 185, corresponding to amino acid positions: 41, 58, 78, 107, 117, 125, 133and 159;

[0496] the IFNα-d modified protein that is human and is selected from among proteins comprising one or more single amino acid replacements in SEQ ID NO: 186, corresponding to amino acid positions: 41, 59, 79, 108, 118, 126, 134 and 160;

[0497] the IFNα-5 modified protein that is human and is selected from among proteins comprising one or more single amino acid replacements in SEQ ID NO: 187, corresponding to amino acid positions: 41, 59, 79, 108, 118, 126, 134 and 160;

[0498] the IFNα-6 modified protein that is human and is selected from among proteins comprising one or more single amino acid replacements in SEQ ID NO: 188, corresponding to amino acid positions: 41, 59, 79, 108, 118, 126, 134and 160;

[0499] the IFNα-4 modified protein that is human and is selected from among proteins comprising one or more single amino acid replacements in SEQ ID NO: 189, corresponding to amino acid positions: 41, 59, 79, 108, 118, 126, 134 and 160;

[0500] the IFNα-4b modified protein that is human and is selected from among proteins comprising one or more single amino acid replacements in SEQ ID NO: 190, corresponding to amino acid positions: 41, 59, 79, 108, 118, 126, 134 and 160;

[0501] the IFNα-I modified protein that is human and is selected from among proteins comprising one or more single amino acid replacements in SEQ ID NO: 191, corresponding to amino acid positions: 41, 59, 79, 108, 118, 126, 134 and 160;

[0502] the IFNα-J modified protein that is human and is selected from among proteins comprising one or more single amino acid replacements in SEQ ID NO: 192, corresponding to amino acid positions: 41, 59, 79, 108, 118, 126, 134and 160;

[0503] the IFNα-H modified protein that is human and is selected from among proteins comprising one or more single amino acid replacements in SEQ ID NO: 193, corresponding to amino acid positions: 41, 59, 79, 108, 118, 126, 134 and 160;

[0504] the IFNα-F modified protein that is human and is selected from among proteins comprising one or more single amino acid replacements in SEQ ID NO: 194, corresponding to amino acid positions: 41, 59, 79, 108, 118, 126, 134and 160;

[0505] the IFNα-8 modified protein that is human and is selected from among proteins comprising one or more single amino acid replacements in SEQ ID NO: 195, corresponding to amino acid positions: 41, 59, 79, 108, 118, 126, 134 and 160; and

[0506] the IFNα-consensus modified protein that is human and is selected from among proteins that contain one or more single amino acid replacements in SEQ ID NO: 232, corresponding to amino acid positions: 41, 58, 78, 107, 117, 125, 133 and 159.

[0507] b) Structurally Homologous Cytokine Mutants

[0508] As set forth above, provided herein are modified cytokines that contain one or more amino acid replacements at one or more target positions in either interleukin-10 (IL-10), interferon beta (IFNβ), IFNβ-1, IFNβ-2a, interferon gamma (IFN-y), granulocyte colony stimulating factor (G-CSF), and human erythropoietin (EPO); corresponding to a structurally-related modified amino acid position within the 3-dimensional structure of the IFNα-2b modified proteins provided herein. The replacements lead to greater resistance to proteases, as assessed by incubation with a protease or a with a blood lysate or by incubation with serum, compared to the unmodified cytokine.

[0509] Also provided herein are modified cytokines that contain one or more amino acid replacements at one or more target positions in either granulocyte-macrophage colony stimulating factor (GM-CSF), interleukin-2 (IL-2), interleukin-3 (IL-3), interleukin-4 (IL-4), interleukin-5 (IL-5), interleukin-13 (IL-13), Flt3 ligand and stem cell factor (SCF); corresponding to a structurally-related modified amino acid position within the 3-dimensional structure of the human EPO modified proteins provided herein. The replacements lead to greater resistance to proteases, as assessed by incubation with a protease or a with a blood lysate or by incubation with serum, compared to the unmodified cytokine.

[0510] Also provided herein are modified cytokines that contain one or more amino acid replacements at one or more target positions in either interleukin-10 (IL-10), interferon beta (IFNβ), interferon gamma (IFN-y), human granulocyte colony stimulating factor (G-CSF), leukemia inhibitory factor (LIF), human growth hormone (hGH), ciliary neurotrophic factor (CNTF), leptin, oncostatin M, interleukin-6 (IL-6) and interleukin-12 (IL-12); corresponding to a structurally-related modified amino acid position within the 3-dimensional structure of the human G-CSF modified proteins provided herein. The replacements lead to greater resistance to proteases, as assessed by incubation with a protease or a with a blood lysate or by incubation with serum, compared to the unmodified cytokine.

[0511] In particular embodiments, the modified cytokines are selected from the following.

[0512] A modified IFNβ cytokine, comprising mutations at one or more amino acid residues of IFNβ corresponding to SEQ ID NO: 196: 39, 42, 45, 47, 52, 67, 71, 73, 81, 107, 108, 109, 110, 111, 113, 116, 120, 123, 124, 128, 130, 134, 136, 137, 163 and 165. The mutations include insertions, deletions and replacements of the native amino acid residue(s). In particular embodiments, the replacements are selected from among amino acid substitutions in SEQ ID NO: 196 set forth in FIG. 12A corresponding to SEQ ID NOS: 233-289, where the first amino acid indicated is substituted by the second at the position indicated for all of the substitutions set forth in FIGS. 12A through T.

[0513] A modified IFNβ-1 cytokine, comprising mutations at one or more amino acid residues of IFNβ-1 corresponding to SEQ ID NO: 197: 39, 42, 45, 47, 52, 67, 71, 73, 81, 107, 108, 109, 110, 111, 113, 116, 120, 123, 124, 128, 130, 134, 136, 137, 163 and 165. The mutations include insertions, deletions and replacements of the native amino acid residue(s).

[0514] A modified IFNβ-2a cytokine, comprising mutations at one or more amino acid residues of IFNβ-2a corresponding to SEQ ID NO:198: 39, 42, 45, 47, 52, 67, 71, 73, 81, 107, 108, 109, 110, 111, 113, 116, 120, 123, 124, 128, 130, 134, 136, 137, 163 and 165. The mutations include insertions, deletions and replacements of the native amino acid residue(s).

[0515] A modified IFN-gamma cytokine, comprising mutations at one or more amino acid residues of IFN-gamma corresponding to SEQ ID NO:199: 33, 37, 40, 41, 42, 58, 61, 64, 65 and 66. The mutations include insertions, deletions and replacements of the native amino acid residue(s). In particular embodiments, the replacements are selected from among amino acid substitutions in SEQ ID NO:199 set forth in FIG. 12B corresponding to SEQ ID NOS: 290-311.

[0516] A modified IL-10 cytokine, comprising mutations at one or more amino acid residues of IL-10 corresponding to SEQ ID NO:200: 49, 50, 52, 53, 54, 55, 56, 57, 59, 60, 67, 68, 71, 72, 74, 75, 78, 81, 84, 85, 86, and 88. The mutations include insertions, deletions and replacements of the native amino acid residue(s). In exemplary embodiments, replacements are selected from among amino acid substitutions in SEQ ID NO:200 set forth in FIG. 12C corresponding to SEQ ID NOS: 312-361.

[0517] A modified erythropoietin cytokine, comprising mutations at one or more amino acid residues of erythropoietin corresponding to SEQ ID NO:201: 43, 45, 48, 49, 52, 53, 55, 72, 75, 76, 123, 129, 130, 131, 162, and 165. The mutations include insertions, deletions and replacements of the native amino acid residue(s). In exemplary embodiments, the replacements are selected from among amino acid substitutions in SEQ ID NO: 201 set forth in FIG. 12L corresponding to SEQ ID NOS: 940-977.

[0518] A modified GM-CSF cytokine, comprising mutations at one or more amino acid residues of GM-CSF corresponding to SEQ ID NO: 202: 38, 41, 45, 46, 48, 49, 51, 60, 63, 67, 92, 93, 119, 120, 123, and 124. The mutations include insertions, deletions and replacements of the native amino acid residue(s). In exemplary embodiments, the replacements are selected from among amino acid substitutions in SEQ ID NO: 202 set forth in FIG. 12N corresponding to SEQ ID NOS: 362-400.

[0519] A modified Flt3 ligand cytokine, comprising mutations at one or more amino acid residues of Flt3 ligand corresponding to SEQ ID NO: 203: 3, 40, 42, 43, 55, 58, 59, 61, 89, 90, 91, 95, and 96. The mutations include insertions, deletions and replacements of the native amino acid residue(s). In exemplary embodiments, the replacements are selected from among amino acid substitutions in SEQ ID NO: 203 set forth in FIG. 12M corresponding to SEQ ID NOS: 401-428.

[0520] A modified IL-2 cytokine, comprising mutations at one or more amino acid residues of IL-2 corresponding to SEQ ID NO: 204 at positions 43, 45, 48, 49, 52, 53, 60, 61, 65, 67, 68, 72, 100, 103, 104, 106, 107, 109, 110, and 132. The mutations include insertions, deletions and replacements of the native amino acid residue(s). In exemplary embodiments, the replacements are selected from among amino acid substitutions in SEQ ID NO: 204 set forth in FIG. 12P and SEQ ID NOS: 429-476.

[0521] A modified IL-3 cytokine, comprising mutations at one or more amino acid residues of IL-3 corresponding to SEQ ID NO: 205: 37, 43, 46, 59, 63, 66, 96, 100, 101, and 103. The mutations include insertions, deletions and replacements of the native amino acid residue(s). In exemplary embodiments, the replacements are selected from among amino acid substitutions in SEQ ID NO:205 set forth in FIG. 12Q corresponding to SEQ ID NOS: 477-498.

[0522] A modified SCF cytokine, comprising mutations at one or more amino acid residues of SCF corresponding to SEQ ID NO: 206: 27, 31, 34, 37, 54, 58, 61, 62, 63, 96, 98, 99, 100, 102, 103, 106, 107, 108, 109, 134, and 137. The mutations include insertions, deletions and replacements of the native amino acid residue(s). In exemplary embodiments, the replacements are selected from among amino acid substitutions in SEQ ID NO: 206 set forth in FIG. 12T corresponding to SEQ ID NOS: 499-542.

[0523] A modified IL-4 cytokine, comprising mutations at one or more amino acid residues of IL-4 corresponding to SEQ ID NO: 207: 26, 37, 53, 60, 61, 64, 66, 100, 102, 103, and 126. The mutations include insertions, deletions and replacements of the native amino acid residue(s). In exemplary embodiments, the replacements are selected from among amino acid substitutions in SEQ ID NO: 207 set forth in FIG. 12R corresponding to SEQ ID NOS: 543-567.

[0524] A modified IL-5 cytokine, comprising mutations at one or more amino acid residues of IL-5 corresponding to SEQ ID NO: 208: 32, 34, 39, 46, 47, 56, 84, 85, 88, 89, 90, 102, 110, and 111. The mutations include insertions, deletions and replacements of the native amino acid residue(s). In exemplary embodiments, the replacements are selected from among amino acid substitutions in SEQ ID NO: 208 set forth in FIG. 12S corresponding to SEQ ID NOS: 568-602.

[0525] A modified IL-13 cytokine, comprising mutations at one or more amino acid residues of IL-13 corresponding to SEQ ID NO: 209: 32, 34, 38, 48, 79, 82, 85, 86, 88, 107, 108, 110, and 111. The mutations include insertions, deletions and replacements of the native amino acid residue(s). In exemplary embodiments, the replacements are selected from among amino acid substitutions in SEQ ID NO: 209 set forth in FIG. 12O corresponding to SEQ ID NOS: 603-630.

[0526] A modified G-CSF cytokine, comprising mutations at one or more amino acid residues of G-CSF corresponding to SEQ ID NO: 210: 61, 63, 68, 72, 86, 96, 100, 101, 131, 133, 135, 147, 169, 172, and 177. The mutations include insertions, deletions and replacements of the native amino acid residue(s). In exemplary embodiments, the replacements are selected from among amino acid substitutions in SEQ ID NO: 210 set forth in FIG. 12E corresponding to SEQ ID NOS: 631-662.

[0527] A modified leptin cytokine, comprising mutations at one or more amino acid residues of leptin corresponding to SEQ ID NO: 211: 43, 49, 99, 100, 104, 105, 107, 108, 141 and 142. The mutations include insertions, deletions and replacements of the native amino acid residue(s). In exemplary embodiments, the replacements are selected from among amino acid substitutions in SEQ ID NO: 211 set forth in FIG. 12I corresponding to SEQ ID NOS: 663-683.

[0528] A modified CNTF cytokine, comprising mutations at one or more amino acid residues of CNTF corresponding to SEQ ID NO: 212: 62, 64, 66, 67, 86, 89, 92, 100, 102, 104, 131, 132, 133, 135, 136, 138, 140, 143, 148, and 151. The mutations include insertions, deletions and replacements of the native amino acid residue(s). In exemplary embodiments, the replacements are selected from among amino acid substitutions in SEQ ID NO: 212 set forth in FIG. 12D corresponding to SEQ ID NOS: 684-728.

[0529] A modified LIF cytokine, comprising mutations at one or more amino acid residues of LIF corresponding to SEQ ID NO: 213: 69, 70, 85, 99, 102, 104, 106, 109, 137, 143, 146, 148, 149, 153, 154, and 156. The mutations include insertions, deletions and replacements of the native amino acid residue(s). In exemplary embodiments, the replacements are selected from among amino acid substitutions in SEQ ID NO: 213 set forth in FIG. 12J corresponding to SEQ ID NOS: 729-760.

[0530] A modified oncostatin M cytokine, comprising mutations at one or more amino acid residues of oncostatin M corresponding to SEQ ID NO: 214: 59, 60, 63, 65, 84, 87, 89, 91, 94, 97, 99, 100, 103, and 106. The mutations include insertions, deletions and replacements of the native amino acid residue(s). In exemplary embodiments, the replacements are selected from among amino acid substitutions in SEQ ID NO: 214 set forth in FIG. 12K corresponding to SEQ ID NOS: 761-793.

[0531] A modified IL-12 cytokine, comprising mutations at one or more amino acid residues of IL-12 corresponding to SEQ ID NO: 215: 56, 61, 66, 67, 68, 70, 72, 75, 78, 79, 82, 89, 92, 93, 107, 110, 111, 115, 117, 124, 125, 127, 128, 129, and 189. The mutations include insertions, deletions and replacements of the native amino acid residue(s). In exemplary embodiments, the replacements are selected from among amino acid substitutions in SEQ ID NO: 215 set forth in FIG. 12G corresponding to SEQ ID NOS: 794-849.

[0532] A modified hGH cytokine, comprising mutations at one or more amino acid residues of hGH corresponding to SEQ ID NO: 216: 56, 59, 64, 65, 66, 88, 92, 94, 101, 129, 130, 133, 134, 140, 143, 145, 146, 147, 183, and 186. The mutations include insertions, deletions and replacements of the native amino acid residue(s). In exemplary embodiments, the replacements are selected from among amino acid substitutions in SEQ ID NO: 216 set forth in FIG. 12F corresponding to SEQ ID NOS: 850-895.

[0533] A modified IL-6 cytokine, comprising mutations at one or more amino acid residues of IL-6 corresponding to SEQ ID NO: 217: 64, 65, 66, 68, 69, 75, 77, 92, 98, 103, 105, 108, 133, 138, 139, 140, 149, 156, 178, and 181. The mutations include insertions, deletions and replacements of the native amino acid residue(s). In exemplary embodiments, the replacements are selected from among amino acid substitutions in SEQ ID NO: 217 set forth in FIG. 12H corresponding to SEQ ID NOS: 896-939.

[0534] In certain embodiments, the modified cytokines provided herein possess increased stability compared to the unmodified cytokine. Stability can be assessed by any in vitro or in vivo method, such as by measuring residual inhibition of viral replication or to stimulation of cell proliferation in appropriate cells, after incubation with either mixtures of proteases, individual proteases, blood lysate or serum.

[0535] In other embodiments, the modified cytokines provided herein possess decreased stability compared to the unmodified cytokine. Stability can be assessed by any in vitro or in vivo method, such as by measuring residual inhibition of viral replication or to stimulation of cell proliferation in appropriate cells, after incubation with either mixtures of proteases, individual proteases, blood lysate or serum.

[0536] In ther embodiments, the modified cytokines provided herein possess increased activity compared to the unmodified cytokine. Stability can be assessed by any in vitro or in vivo method, such as by measuring residual inhibition of viral replication or to stimulation of cell proliferation in appropriate cells, after incubation with either mixtures of proteases, individual proteases, blood lysate or serum.

[0537] H. Rational Evolution of IFNβ for Increased Resistance to Proteolysis and/or Higher Conformational Stability

[0538] Treatment with interferon b (IFNβ) is a well established therapy. Typically it is used for treatment of multiple sclerosis (MS). Patients receiving interferon β are subject to frequent repeat applications of the drug. The instability of IFNβ in the blood stream and under the storage conditions is well known. Hence it would be useful to increasing stability (half-life) of IFNβ in serum and also in vitro would improve it as a drug.

[0539] The 2D-scanning method and the 3D-scanning method (using structural homology) provided herein (see, copending ) were each applied to interferon β. Provided herein are mutant variants of the IFNβ protein that display improved stability as assessed by resistance to proteases (thereby possessing increased protein half-life) and at least comparable biological activity as assessed by antiviral or antiproliferation activity compared to the unmodified and wild type native IFNβ protein (SEQ ID NO: 196). The IFNβ mutant proteins provided herein confer a higher half-life and at least comparable biological activity with respect to the native sequence. Thus, the optimized IFNβ protein mutants provided herein that possess increased resistance to proteolysis result in a decrease in the frequency of injections needed to maintain a sufficient drug level in serum, thus leading to, for example: i) higher comfort and acceptance by patients, ii) lower doses necessary to achieve comparable biological effects, and iii) as a consequence of (ii), likely attenuation of any secondary effects.

[0540] In exemplary embodiments, the half-life of the IFNβ mutants provided herein is increased by an amount selected from at least 10%, at least 20%, at least 30%, at least 40%, at least 50%, at least 60%, at least 70%, at least 80%, at least 90%, at least 100%, at least 150%, at least 200%, at least 250%, at least 300%, at least 350%, at least 400%, at least 450%, at least 500% or more, when compared to the half-life of native human IFNβ in either human blood, human serum or an in vitro mixture containing one or more proteases. In other embodiments, the half-life of the IFNβ mutants provided herein is increased by an amount selected from at least 6 times, 7 times, 8 times, 9 times, 10 times, 20 times, 30 times, 40 times, 50 times, 60 times, 70 times, 80 times, 90 times, 100 times, 200 times, 300 times, 400 times, 500 times, 600 times, 700 times, 800 times, 900 times, 1000 times, or more, when compared to the half-life of native human IFNβ in either human blood, human serum or an in vitro mixture containing one or more proteases.

[0541] Two approaches were used herein to increase the stability of IFNβ by amino acid replacement: i) Resistance to proteases: amino acid replacement that leads to higher resistance to proteases by direct destruction of the protease target residue or sequence, while either maintaining or improving the requisite biological activity (e.g., antiviral and anti-proliferation activity), and/or ii) Conformational stability: amino acid replacement that leads to an increase in conformational stability (i.e. half-life at room temperature or at 37° C.), while either improving or maintaining the requisite biological activity (e.g., antiviral and anti-proliferation activity).

[0542] Two methodologies were used to address the improvements described above: (a) 2D-scanning methods were used to identify aminoacid changes that lead to improvement in protease resistance and to improvement in conformational stability, and (b) 3D-scanning, which employs structural homology methods methods also were used to identify aminoacid changes that lead to improvement in protease resistance. The 2D-scanning and 3D-scanning methods each were used to identify the amino acid changes on IFNβ that lead to an increase in stability when challenged either with proteases, human blood lysate or human serum. Increasing protein stability to proteases, human blood lysate or human serum is contemplated herein to provide a longer in vivo half-life for the particular protein molecules, and thus a reduction in the frequency of necessary injections into patients. The biological activities that have been measured for the IFNβ molecules are i) their capacity to inhibit virus replication when added to permissive cells previously infected with the appropriate virus, and ii) their capacity to stimulate cell proliferation when added to the appropriate cells. Prior to the measurement of biological activity, IFNβ molecules were challenged with proteases, human blood lysate or human serum during different incubation times. The biological activity measured, corresponds then to the residual biological activity following exposure to the proteolytic mixtures.

[0543] As set forth above, provided herein are methods for the generating IFNβ molecules (or any target protein, particularly cytokines) that, while maintaining a requisite biological activity without substantial change (sufficient for therapeutic application(s)), have been rendered less susceptible to digestion by blood proteases and therefore display a longer half-life in blood circulation. In this particular example, the method used included the following specific steps as exemplified in the Examples: For the improvement of resistance to proteases, by 2D-scanning, the method included:

[0544] 1) Identifying some or all possible target sites on the protein sequence that are susceptible to digestion by one or more specific proteases (these sites are the is-HITs); and

[0545] 2) Identifying appropriate replacing amino acids, specific for each is-HIT, such that if used to replace one or more of the original amino acids at that specific is-HIT, they can be expected to increase the is-HIT's resistance to digestion by protease while at the same time, keeping the biological activity of the protein unchanged (these replacing amino acids are the candidate LEADs).

[0546] For the improvement of resistance to proteases, by 3D-scanning (structural homology):

[0547] 1) Identifying some or all possible target sites (is-HITS) on the protein sequence that display an acceptable degree of structural homology around the aminoacid positions mutated in the LEAD molecules previously obtained for IFNα using 2D-scanning, and that are susceptible to digestion by one or more specific proteases; and

[0548] 2) Identifying appropriate replacing amino acids, specific for each is-HIT, such that if used to replace one or more of the original amino acids at that specific is-HIT, they can be expected to increase the is-HIT's resistance to digestion by protease while at the same time, keeping the biological activity of the protein unchanged (these replacing amino acids are the candidate LEADs).

[0549] For the improvement of conformational stability, by 2D-scanning, as provided herein:

[0550] 1) Identifying some or all possible target sites on the protein sequence that are susceptible to being directly involved in the intramolecular flexibility and conformational change (these sites are the is-HITs); and

[0551] 2) Identifying appropriate replacing amino acids, specific for each is-HIT, such that if used to replace one or more of the original amino acids at that specific is-HIT, they can be expected to increase the thermal stability of the molecule while at the same time, keeping the biological activity of the protein unchanged (these replacing amino acids are the candidate LEADs).

[0552] See FIGS. 6(O)-6(S) and FIG. 8(A). Using the 2D-scanning and 3D-scanning methods and the 3-dimensional structure of IFNβ, the following amino acid target positions were identified as is-HITs on IFNβ, which numbering is that of the mature protein (SEQ ID NO:196):

[0553] By 3D-scanning (see, SEQ ID Nos. 234-289, 989-1015): D by Q at position 39, D by H at position 39, D by G at position 39, E by Q at position 42, E by H at position 42, K by Q at position 45, K by T at position 45, K by S at position 45, K by H at position 45, L by V at position 47, L by I at position 47, L by T at position 47, L by Q at position 47, L by H at position 47, L by A at position 47, K by Q at position 52, K by T at position 52, K by S at position 52, K by H at position 52, F by I at position 67, F by V at position 67, R by H at position 71, R by Q at position 71, D by H at position 73, D by G at position 73, D by Q at position 73, E by Q at position 81, E by H at position 81, E by Q at position 107, E by H at position 107, K by Q at position 108, K by T at position 108, K by S at position 108, K by H at position 108, E by Q at position 109, E by H at position 109, D by Q at position 110, D by H at position 110, D by G at position 110, F by I at position 111, F by V at position 111, R by H at position 113, R by Q at position 113, L by V at position 116, L by I at position 116, L by T at position 116, L by Q at position 116, L by H at position 116, L by A at position 116, L by V at position 120, L by I at position 120, L by T at position 120, L by Q at position 120, L by H at position 120, L by A at position 120, K by Q at position 123, K by T at position 123, K by S at position 123, K by H at position 123, R by H at position 124,, R by Q at position 124, R by H at position 128, R by Q at position 128, L by V at position 130, L by I at position 130, L by T at position 130, L by Q at position 130, L by H at position 130, L by A at position 130, K by Q at position 134, K by T at position 134, K by S at position 134, K by H at position 134, K by Q at position 136, K by T at position 136, K by S at position 136,, K by H at position 136, E by Q at position 137, E by H at position 137, Y by H at position 163, Y by I at position 1631, R by H at position 165, R by Q at position 165.

[0554] By 2D-scanning (see SEQ ID Nos.1016-1302): M by V at position 1, M by I at position 1, M by T at position 1, M by Q at position 1, M by A at position 1, L by V at position 5, L by I at position 5, L by T at position 5, L by Q at position 5, L by H at position 5, L by A at position 5, F by I at position 8, F by V at position 8, L by V at position 9, L by I at position 9, L by T at position 9, L by Q at position 9, L by H at position 9, L by A at position 9, R by H at position 11, R by Q at position 11, F by I at position 15, F by V at position 15, K by Q at position 19, K by T at position 19, K by S at position 19, K by H at position 19, W by S at position 22, W by H at position 22, N by H at position 25, N by S at position 25, N by Q at position 25, R by H position 27, R by Q position 27, L by V at position 28, L by I at position 28, L by T at position 28, L by Q at position 28, L by H at position 28, L by A at position 28, E by Q at position 29, E by H at position 29, Y by H at position 30, Y by I at position 30, L by V at position 32, L by I at position 32, L by T at position 32, L by Q at position 32, L by H at position 32, L by A at position 32, K by Q at position 33, K by T at position 33, K by S at position 33, K by H at position 33, R by H at position 35, R by Q at position 35, M by V at position 36, M by I at position 36, M by T at position 36, M by Q at position 36, M by A at position 36, D by Q at position 39, D by H at position 39, D by G at position 39, E by Q at position 42, E by H at position 42, K by Q at position 45, K by T at position 45, K by S at position 45, K by H at position 45, L by V at position 47, L by I at position 47, L by T at position 47, L by, Q at position 47, L by H at position 47, L by A at position 47, K by Q at position 52, K by T at position 52, K by S at position 52, K by H at position 52, F by I at position 67, F by V at position 67, R by H at position 71, R by Q at position 71, D by Q at position 73, D by H at position 73, D by G at position 73, E by Q at position 81, E by H at position 81, E by Q at position 85, E by H at position 85, Y by H at position 92, Y by I at position 92, K by Q at position 99, K by T at position 99, K by S at position 99, K by H at position 99, E by Q at position 103, E by H at position 103, E by Q at position 104, E by H at position 104, K by Q at position 105, K by T at position 105, K by S at position 105, K by H at position 105, E by Q at position 107, E by H at position 107, K by Q at position 108, K by T at position 108, K by S at position 108, K by H at position 108, E by Q at position 109, E by H at position 109, D by Q at position 110, D by H at position 110, D by G at position 110, F by I at position 111, F by V at position 111, R by H at position 113, R by Q at position 113, L by V at position 116, L by I at position 116, L by T at position 116, L by Q at position 116, L by H at position 116, L by A at position 116, L by V at position 120, L by I at position 120, L by T at position 120, L by Q at position 120, L by H at position 120, L by A at position 120, K by Q at position 123, K by T at position 123, K by S at position 123, K by H at position 123, R by H at position 124, R by Q at position 124, R by H at position 128, R by Q at position 128, L by V at position 130, L by I at position 130, L by T at position 130, L by Q at position 130, L by H at position 130, L by A at position 130, K by Q at position 134, K by T at position 134, K by S at position 134, K by H at position 134, K by Q at position 136, K by T at position 136, K by S at position 136, K by H at position 136, E by Q at position 137, E by H at position 137, Y by H at position 138, Y by I at position 138, R by H at position 152, R by Q at position 152, Y by H at position 155, Y by I at position 155, R by H at position 159, R by Q at position 159, Y by H at position 163, Y by I at position 163, R by H at position 165, R by Q at position 165, M by D at position 1, M by E at position 1, M by K at position 1, M by N at position 1, M by R at position 1, M by S at position 1, L by D at position 5, L by E at position 5, L by K at position 5, L by N at position 5, L by R at position 5, L by S at position 5, L by D at position 6, L by E at position 6, L by K at position 6, L by N at position 6, L by R at position 6, L by S at position 6, L by Q at position 6, L by T at position 6, F by E at position 8, F by K at position 8, F by R at position 8, F by D at position 8, L by D at position 9, L by E at position 9, L by K at position 9, L by N at position 9, L by R at position 9, L by S at position 9, Q by D at position 10, Q by E at position 10, Q by K at position 10, Q by N at position 10, Q by R at position 10, Q by S at position 10, Q by T at position 10, S by D at position 12, S by E at position 12, S by K at position 12, S by R at position 12, S by D at position 13, S by E at position 13, S by K at position 13, S by R at position 13, S by N at position 13, S by Q at position 13, S by T at position 13, N by D at position 14, N by E at position 14, N by K at position 14, N by Q at position 14, N by R at position 14, N by S at position 14, N by T at position 14, F by D at position 15, F by E at position 15, F by K at position 15, F by R at position 15, Q by D at position 16, Q by E at position 16, Q by K at position 16, Q by N at position 16, Q by R at position 16, Q by S at position 16, Q by T at position 16, C by D at position 17, C by E at position 17, C by K at position 17, C by N at position 17, C by Q at position 17, C by R at position 17, C by S at position 17, C by T at position 17, L by N at position 20, L by Q at position 20, L by R at position 20, L by S at position 20, L by T at position 20, L by D at position 20, L by E at position 20, L by K at position 20, W by D at position 22, W by E at position 22, W by K at position 22, W by R at position 22, Q by D at position 23, Q by E at position 23, Q by K at position 23, Q by R at position 23, L by D at position 24, L by E at position 24, L by K at position 24, L by R at position 24, W by D at position 79, W by E at position 79, W by K at position 79, W by R at position 79, N by D at position 80, N by E at position 80, N by K at position 80, N by R at position 80, T by D at position 82, T by E at position 82, T by K at position 82, T by R at position 82, I by D at position 83, I by E at position 83, I by K at position 83, I by R at position 83, I by N at position 83, I by Q at position 83, I by S at position 83, I by T at position 83, N by D at position 86, N by E at position 86, N by K at position 86, N by R at position 86, N by Q at position 86, N by S at position 86, N by T at position 86, L by D at position 87, L by E at position 87, L by K at position 87, L by R at position 87, L by N at position 87, L by Q at position 87, L by S at position 87, L by T at position 87, A by D at position 89, A by E at position 89, A by K at position 89, A by R at position 89, N by D at position 90, N by E at position 90, N by K at position 90, N by Q at position 90, N by R at position 90, N by S at position 90, N by T at position 90, V by D at position 91, V by E at position 91, V by K at position 91, V by N at position 91, V by Q at position 91, V by R at position 91, V by S at position 91, V by T at position 91, Q by D at position 94, Q by E at position 94, Q by Q at position 94, Q by N at position 94, Q by R at position 94, Q by S at position 94, Q by T at position 94, I by D at position 95, I by E at position 95, I by K at position 95, I by N at position 95, I by Q at position 95, I by R at position 95, I by S at position 95, I by T at position 95, H by D at position 97, H by E at position 97, H by K at position 97, H by N at position 97, H by Q at position 97, H by R at position 97, H by S at position 97, H by T at position 97, L by D at position 98, L by E at position 98, L by K at position 98, L by N at position 98, L by Q at position 98, L by R at position 98, L by S at position 98, L by T at position 98, V by D at position 101, V by E at position 101, V by K at position 101, V by N at position 101, V by Q at position 101, V by R at position 101, V by S at position 101, V by T at position 101, M by C at position 1, L by C at position 6, Q by C at position 10, S by C at position 13, Q by C at position 16, L by C at position 17, V by C at position 101, L by C at position 98, H by C at position 97, Q by C at position 94, V by C at position 91, N by C at position 90.

| SEQ ID NO. | Mutant |
|---|---|
| SEQ ID N° 1016 | (M1V) |
| SEQ ID N° 1017 | (M1I) |
| SEQ ID N° 1018 | (M1T) |
| SEQ ID N° 1019 | (M1A) |
| SEQ ID N° 1020 | (L5V) |
| SEQ ID N° 1021 | (L5I) |
| SEQ ID N° 1022 | (L5T) |
| SEQ ID N° 1023 | (L5Q) |
| SEQ ID N° 1024 | (L5H) |
| SEQ ID N° 1025 | (L5A) |
| SEQ ID N° 1026 | (F8I) |
| SEQ ID N° 1027 | (F8V) |
| SEQ ID N° 1028 | (L9V) |
| SEQ ID N° 1029 | (L9I) |
| SEQ ID N° 1030 | (L9T) |
| SEQ ID N° 1031 | (L9Q) |
| SEQ ID N° 1032 | (L9H) |
| SEQ ID N° 1033 | (L9A) |
| SEQ ID N° 1034 | (R11H) |
| SEQ ID N° 1035 | (R11Q) |
| SEQ ID N° 1036 | (F15I) |
| SEQ ID N° 1037 | (F15V) |
| SEQ ID N° 1038 | (K19Q) |
| SEQ ID N° 1039 | (K19T) |
| SEQ ID N° 1040 | (K19S) |
| SEQ ID N° 1041 | (K19H) |
| SEQ ID N° 1042 | (W22S) |
| SEQ ID N° 1043 | (W22H) |
| SEQ ID N° 1044 | (N25H) |
| SEQ ID N° 1045 | (N25S) |
| SEQ ID N° 1046 | (N25Q) |
| SEQ ID N° 1047 | (R27H) |
| SEQ ID N° 1048 | (R27Q) |
| SEQ ID N° 1049 | (L28V) |
| SEQ ID N° 1050 | (L28I) |
| SEQ ID N° 1051 | (L28T) |
| SEQ ID N° 1052 | (L28Q) |
| SEQ ID N° 1053 | (L28H) |
| SEQ ID N° 1054 | (L28A) |
| SEQ ID N° 1055 | (E29Q) |
| SEQ ID N° 1056 | (E29H) |
| SEQ ID N° 1057 | (Y30H) |
| SEQ ID N° 1058 | (Y30I) |
| SEQ ID N° 1059 | (L32V) |
| SEQ ID N° 1060 | (L32I) |
| SEQ ID N° 1061 | (L32T) |
| SEQ ID N° 1062 | (L32Q) |
| SEQ ID N° 1063 | (L32H) |
| SEQ ID N° 1064 | (L32A) |
| SEQ ID N° 1065 | (M1Q) |
| SEQ ID N° 1066 | (K33Q) |
| SEQ ID N° 1067 | (K33T) |
| SEQ ID N° 1068 | (K33S) |
| SEQ ID N° 1069 | (K33H) |
| SEQ ID N° 1070 | (R35H) |
| SEQ ID N° 1071 | (R35Q) |
| SEQ ID N° 1072 | (M36V) |
| SEQ ID N° 1073 | (M36I) |
| SEQ ID N° 1074 | (M36T) |
| SEQ ID N° 1075 | (M36Q) |
| SEQ ID N° 1076 | (M36A) |
| SEQ ID N° 1077 | (E85Q) |
| SEQ ID N° 1078 | (E85H) |
| SEQ ID N° 1079 | (Y92H) |
| SEQ ID N° 1080 | (Y92I) |
| SEQ ID N° 1081 | (K99Q) |
| SEQ ID N° 1082 | (K99T) |
| SEQ ID N° 1083 | (K99S) |
| SEQ ID N° 1084 | (K99H) |
| SEQ ID N° 1085 | (E103Q) |
| SEQ ID N° 1086 | (E103H) |
| SEQ ID N° 1087 | (E104Q) |
| SEQ ID N° 1088 | (E104H) |
| SEQ ID N° 1089 | (K105Q) |
| SEQ ID N° 1090 | (K105T) |
| SEQ ID N° 1091 | (K105S) |
| SEQ ID N° 1092 | (K105H) |
| SEQ ID N° 1093 | (Y138H) |
| SEQ ID N° 1094 | (Y138I) |
| SEQ ID N° 1095 | (R152H) |
| SEQ ID N° 1096 | (R152Q) |
| SEQ ID N° 1097 | (Y155H) |
| SEQ ID N° 1098 | (Y155I) |
| SEQ ID N° 1099 | (R159H) |
| SEQ ID N° 1100 | (R159Q) |
| SEQ ID N° 1101 | (M1D) |
| SEQ ID N° 1102 | (M1E) |
| SEQ ID N° 1103 | (M1K) |
| SEQ ID N° 1104 | (M1N) |
| SEQ ID N° 1105 | (M1R) |
| SEQ ID N° 1106 | (M1S) |
| SEQ ID N° 1107 | (L5D) |
| SEQ ID N° 1108 | (L5E) |
| SEQ ID N° 1109 | (L5K) |
| SEQ ID N° 1110 | (L5R) |
| SEQ ID N° 1111 | (L5N) |
| SEQ ID N° 1112 | (L5S) |
| SEQ ID N° 1113 | (L6D) |
| SEQ ID N° 1114 | (L6E) |
| SEQ ID N° 1115 | (L6K) |
| SEQ ID N° 1116 | (L6N) |
| SEQ ID N° 1117 | (L6Q) |
| SEQ ID N° 1118 | (L6R) |
| SEQ ID N° 1119 | (L6S) |
| SEQ ID N° 1120 | (L6T) |
| SEQ ID N° 1121 | (F8D) |
| SEQ ID N° 1122 | (F8E) |
| SEQ ID N° 1123 | (F8K) |
| SEQ ID N° 1124 | (F8R) |
| SEQ ID N° 1125 | (L9D) |
| SEQ ID N° 1126 | (L9E) |
| SEQ ID N° 1127 | (L9K) |
| SEQ ID N° 1128 | (L9N) |
| SEQ ID N° 1129 | (L9R) |
| SEQ ID N° 1130 | (L9S) |
| SEQ ID N° 1131 | (Q10D) |
| SEQ ID N° 1132 | (Q10E) |
| SEQ ID N° 1133 | (Q10K) |
| SEQ ID N° 1134 | (Q10N) |
| SEQ ID N° 1135 | (Q10R) |
| SEQ ID N° 1136 | (Q10S) |
| SEQ ID N° 1137 | (Q10T) |
| SEQ ID N° 1138 | (S12D) |
| SEQ ID N° 1139 | (S12E) |
| SEQ ID N° 1140 | (S12K) |
| SEQ ID N° 1141 | (S12R) |
| SEQ ID N° 1142 | (S13D) |
| SEQ ID N° 1143 | (S13E) |
| SEQ ID N° 1144 | (S13K) |
| SEQ ID N° 1145 | (S13N) |
| SEQ ID N° 1146 | (S13Q) |
| SEQ ID N° 1147 | (S13R) |
| SEQ ID N° 1148 | (S13T) |
| SEQ ID N° 1149 | (N14D) |
| SEQ ID N° 1150 | (N14E) |
| SEQ ID N° 1151 | (N14K) |
| SEQ ID N° 1152 | (N14Q) |
| SEQ ID N° 1153 | (N14R) |
| SEQ ID N° 1154 | (N14S) |
| SEQ ID N° 1155 | (N14T) |
| SEQ ID N° 1156 | (F15D) |
| SEQ ID N° 1157 | (F15E) |
| SEQ ID N° 1158 | (F15K) |
| SEQ ID N° 1159 | (F15R) |
| SEQ ID N° 1160 | (Q16D) |
| SEQ ID N° 1161 | (Q16E) |
| SEQ ID N° 1162 | (Q16K) |
| SEQ ID N° 1163 | (Q16N) |
| SEQ ID N° 1164 | (Q16R) |
| SEQ ID N° 1165 | (Q16S) |
| SEQ ID N° 1166 | (Q16T) |
| SEQ ID N° 1167 | (C17D) |
| SEQ ID N° 1168 | (C17E) |
| SEQ ID N° 1169 | (C17K) |
| SEQ ID N° 1170 | (C17N) |
| SEQ ID N° 1171 | (C17Q) |
| SEQ ID N° 1172 | (C17R) |
| SEQ ID N° 1173 | (C17S) |
| SEQ ID N° 1174 | (C17T) |
| SEQ ID N° 1175 | (L20N) |
| SEQ ID N° 1176 | (L20Q) |
| SEQ ID N° 1177 | (L20R) |
| SEQ ID N° 1178 | (L20S) |
| SEQ ID N° 1179 | (L20T) |
| SEQ ID N° 1180 | (L20D) |
| SEQ ID N° 1181 | (L20E) |
| SEQ ID N° 1182 | (L20K) |
| SEQ ID N° 1183 | (W22D) |
| SEQ ID N° 1184 | (W22E) |
| SEQ ID N° 1185 | (W22K) |
| SEQ ID N° 1186 | (W22R) |
| SEQ ID N° 1187 | (Q23D) |
| SEQ ID N° 1188 | (Q23E) |
| SEQ ID N° 1189 | (Q23K) |
| SEQ ID N° 1190 | (Q23R) |
| SEQ ID N° 1191 | (L24D) |
| SEQ ID N° 1192 | (L24E) |
| SEQ ID N° 1193 | (L24K) |
| SEQ ID N° 1194 | (L24R) |
| SEQ ID N° 1195 | (G78D) |
| SEQ ID N° 1196 | (G78E) |
| SEQ ID N° 1197 | (G78K) |
| SEQ ID N° 1198 | (G78R) |
| SEQ ID N° 1199 | (W79D) |
| SEQ ID N° 1200 | (W79E) |
| SEQ ID N° 1201 | (W79K) |
| SEQ ID N° 1202 | (W79R) |
| SEQ ID N° 1203 | (N80D) |
| SEQ ID N° 1204 | (N80E) |
| SEQ ID N° 1205 | (N80K) |
| SEQ ID N° 1206 | (N80R) |
| SEQ ID N° 1207 | (T82D) |
| SEQ ID N° 1208 | (T82E) |
| SEQ ID N° 1209 | (T82K) |
| SEQ ID N° 1210 | (T82R) |
| SEQ ID N° 1211 | (I83D) |
| SEQ ID N° 1212 | (I83E) |
| SEQ ID N° 1213 | (I83K) |
| SEQ ID N° 1214 | (I83R) |
| SEQ ID N° 1215 | (I83N) |
| SEQ ID N° 1216 | (I83Q) |
| SEQ ID N° 1217 | (I83S) |
| SEQ ID N° 1218 | (I83T) |
| SEQ ID N° 1219 | (N86D) |
| SEQ ID N° 1220 | (N86E) |
| SEQ ID N° 1221 | (N86K) |
| SEQ ID N° 1222 | (N86R) |
| SEQ ID N° 1223 | (N86Q) |
| SEQ ID N° 1224 | (N86S) |
| SEQ ID N° 1225 | (N86T) |
| SEQ ID N° 1226 | (L87D) |
| SEQ ID N° 1227 | (L87E) |
| SEQ ID N° 1228 | (L87K) |
| SEQ ID N° 1229 | (L87R) |
| SEQ ID N° 1230 | (L87N) |
| SEQ ID N° 1231 | (L87Q) |
| SEQ ID N° 1232 | (L87S) |
| SEQ ID N° 1233 | (L87T) |
| SEQ ID N° 1234 | (A89D) |
| SEQ ID N° 1235 | (A89E) |
| SEQ ID N° 1236 | (A89K) |
| SEQ ID N° 1237 | (A89R) |
| SEQ ID N° 1238 | (N90D) |
| SEQ ID N° 1239 | (N90E) |
| SEQ ID N° 1240 | (N90K) |
| SEQ ID N° 1241 | (N90Q) |
| SEQ ID N° 1242 | (N90R) |
| SEQ ID N° 1243 | (N90S) |
| SEQ ID N° 1244 | (N90T) |
| SEQ ID N° 1245 | (V91D) |
| SEQ ID N° 1246 | (V91E) |
| SEQ ID N° 1247 | (V91K) |
| SEQ ID N° 1248 | (V91N) |
| SEQ ID N° 1249 | (V91Q) |
| SEQ ID N° 1250 | (V91R) |
| SEQ ID N° 1251 | (V91S) |
| SEQ ID N° 1252 | (V91T) |
| SEQ ID N° 1253 | (Q94D) |
| SEQ ID N° 1254 | (Q94E) |
| SEQ ID N° 1255 | (Q94K) |
| SEQ ID N° 1256 | (Q94N) |
| SEQ ID N° 1257 | (Q94R) |
| SEQ ID N° 1258 | (Q94S) |
| SEQ ID N° 1259 | (Q94T) |
| SEQ ID N° 1260 | (I95D) |
| SEQ ID N° 1261 | (I95E) |
| SEQ ID N° 1262 | (I95K) |
| SEQ ID N° 1263 | (I95N) |
| SEQ ID N° 1264 | (I95Q) |
| SEQ ID N° 1265 | (I95R) |
| SEQ ID N° 1266 | (I95S) |
| SEQ ID N° 1267 | (I95T) |
| SEQ ID N° 1268 | (H97D) |
| SEQ ID N° 1269 | (H97E) |
| SEQ ID N° 1270 | (H97K) |
| SEQ ID N° 1271 | (H97N) |
| SEQ ID N° 1272 | (H97Q) |
| SEQ ID N° 1273 | (H97R) |
| SEQ ID N° 1274 | (H97S) |
| SEQ ID N° 1275 | (H97T) |
| SEQ ID N° 1276 | (L98D) |
| SEQ ID N° 1277 | (L98E) |
| SEQ ID N° 1278 | (L98K) |
| SEQ ID N° 1279 | (L98N) |
| SEQ ID N° 1280 | (L98Q) |
| SEQ ID N° 1281 | (L98R) |
| SEQ ID N° 1282 | (L98S) |
| SEQ ID N° 1283 | (L98T) |
| SEQ ID N° 1284 | (V101D) |
| SEQ ID N° 1285 | (V101E) |
| SEQ ID N° 1286 | (V101K) |
| SEQ ID N° 1287 | (V101N) |
| SEQ ID N° 1288 | (V101Q) |
| SEQ ID N° 1289 | (V101R) |
| SEQ ID N° 1290 | (V101S) |
| SEQ ID N° 1291 | (V101T) |
| SEQ ID N° 1292 | (M1C) |
| SEQ ID N° 1293 | (V101C) |
| SEQ ID N° 1294 | (L6C) |
| SEQ ID N° 1295 | (L98C) |
| SEQ ID N° 1296 | (Q10C) |
| SEQ ID N° 1297 | (H97C) |
| SEQ ID N° 1298 | (S13C) |
| SEQ ID N° 1299 | (Q94C) |
| SEQ ID N° 1300 | (Q16C) |
| SEQ ID N° 1301 | (N90C) |
| SEQ ID N° 1302 | (V91C) |

[0555] I. Super-LEADS and Additiv Directional Mutagenesis (ADM)$

[0556] Also provided herein are super-LEAD mutant proteins comprising a combination of single amino acid mutations present in two or more of the respective LEAD mutant proteins. Thus, the super-LEAD mutant proteins have two of more of the single amino acid mutations derived from two or more of the respective LEAD mutant proteins. As described herein, LEAD mutant proteins provided herein are defined as mutants whose performance or fitness has been optimized with respect to the native protein. LEADs typically contain one single mutation relative to its respective native protein. This mutation represents an appropriate amino acid replacement that takes place at one is-HIT position. Further super-LEAD mutant proteins are created such that they carry on the same protein molecule, more than one LEAD mutation, each at different is-HIT position. Once the LEAD mutant proteins have been identified using the 2D-scanning methods provided herein, super-LEADs can be generated by combining two or more individual LEAD mutant mutations using methods well-known in the art, such as recombination, mutagenesis and DNA shuffling, and by methods, such as additive directional mutagenesis and Multi-Overlapped Primer Extensions, provided herein.

[0557] 1) Additive Directional Mutagenesis.

[0558] Also provided herein are methods for assembling on a single mutant protein multiple mutations present on the individual LEAD molecules, so as to generate super-LEAD mutant proteins. This method is referred to herein as “Additive Directional Mutagenesis” (ADM). ADM is a repetitive multi-step process where at each step after the creation of the first LEAD mutant protein a new LEAD mutation is added onto the previous LEAD mutant protein to create successive super-LEAD mutant proteins. ADM is not based on genetic recombination mechanisms, nor on shuffling methodologies; instead it is a simple one-mutation-at-a-time process, repeated as many times as necessary until the total number of desired mutations is introduced on the same molecule. To avoid the exponentially increasing number of all possible combinations that can be generated by putting together on the same molecule a given number of single mutations, a method is provided herein that, although it does not cover all the combinatorial possible space, still captures a big part of the combinatorial potential. The word “combinatorial” is used here in its mathematical meaning (i.e., subsets of a group of elements, containing some of the elements in any possible order) and not in the molecular biological or directed evolution meaning (i.e., generating pools, or mixtures, or collections of molecules by randomly mixing their constitutive elements).

[0559] A population of sets of nucleic acid molecules encoding a collection of new super-LEAD mutant molecules is generated, tested and phenotypically characterized one-by-one in addressable arrays. super-LEAD mutant molecules are such that each molecule contains a variable number and type of LEAD mutations. Those molecules displaying further improved fitness for the particular feature being evolved, are referred to as super-LEADs. Super-LEADs may be generated by other methods known to those of skill in the art and tested by the high throughput methods herein. For purposes herein a super-LEAD typically has activity with respect to the function or biological activity of interest that differs from the improved activity of a LEAD by a desired amount, such as at least 10%, 20%, 30%, 40%, 50%, 60%, 70%, 80%, 90%, 100%, 150%, 200% or more from at least one of the LEAD mutants from which it is derived. In yet other embodiments, the change in activity is at least about 2 times, 3 times, 4 times, 5 times, 6 times, 7 times, 8 times, 9 times, 10 times, 20 times, 30 times, 40 times, 50 times, 60 times, 70 times, 80 times, 90 times, 100 times, 200 times, 300 times, 400 times, 500 times, 600 times, 700 times, 800 times, 900 times, 1000 times, or more greater than at least one of the LEAD molecules from which it is derived. As with LEADs, the change in the activity for super-LEADs is dependent upon the activity that is being “evolved.” The desired alteration, which can be either an increase or a reduction in activity, will depend upon the function or property of interest.

[0560] In one embodiment provided herein, the ADM method employs a number of repetitive steps, such that at each step a new mutation is added on a given molecule. Although numerous different ways are possible for combining each LEAD mutation onto a super-LEAD protein, an exemplary way the new mutations (e.g., mutation 1 (m1), mutation 2 (m2), mutation 3 (m3), mutation 4 (m4), mutation 5 (m5), mutation n (mn)) can be added corresponds to the following diagram:

$$\begin{matrix}m1 \\ m1 + m2 \\ m1 + m2 + m3 \\ m1 + m2 + m3 + m4 \\ m1 + m2 + m3 + m4 + m5 \\ m1 + m2 + m3 + m4 + m5 + … + m n \\ m1 + m2 + m4 \\ m1 + m2 + m4 + m5 \\ m1 + m2 + m4 + m5 + … + m n \\ m1 + m2 + m5 \\ m1 + m2 + m5 + … + m n \\ m2 \\ m2 + m3 \\ m2 + m3 + m4 \\ m2 + m3 + m4 + m5 \\ m2 + m3 + m4 + m5 + … + m n \\ m2 + m4 \\ m2 + m4 + m5 \\ m2 + m4 + m5 + … + m n \\ m2 + m5 \\ m2 + m5 + … + m n \\ … , etc …\end{matrix}$$

[0561] 2) Multi-Overlapped Primer Extensions

[0562] In another embodiment, provided herein is a method for the rational evolution of proteins using oligonucleotide-mediated mutagenesis referred to as “multi overlapped primer extensions.” This method can be used for the rational combination of mutant LEADs to form super-LEADS. This method allows the simultaneous introduction of several mutations throughout a small protein or protein-region of known sequence.

[0563] Overlapping oligonucleotides of typically around 70 bases in length (since longer oligonucleotides lead to increased error) are designed from the DNA sequence (gene) encoding the mutant LEAD proteins in such a way that they overlap with each other on a region of typically around 20 bases. These overlapping oligonucleotides (including or not point mutations) act as both template and primers in a first step of PCR (using a proofreading polymerase, e.g., Pfu DNA polymerase, to avoid unexpected mutations) to create small amounts of full-length gene. The full-length gene resulting from the first PCR is then selectively amplified in a second step of PCR using flanking primers, each one tagged with a restriction site in order to facilitate subsequent cloning. One multi overlapped extension process yields a full-length (multi-mutated) nucleic acid molecule encoding a candidate super-LEAD protein having multiple mutations therein derived from LEAD mutant proteins.

[0564] Although typically about 70 bases are used to create the overlapping oligonucleotides, the length of additional overlapping oligonucleotides for use herein can range from about 30 bases up to about 100 bases, from about 40 bases up to about 90 bases, from about 50 bases up to about 80 bases, from about 60 bases up to about 75 bases, and from about 65 bases up to about 75 bases. As set forth above, typically about 70 bases are used herein.

[0565] Likewise, although typically the overlapping region of the overlapping oligonucleotides is about 20 bases, the length of other overlapping regions for use herein can range from about 5 bases up to about 40 bases, from about 10 bases up to about 35 bases, from about 15 bases up to about 35 bases, from about 15 bases up to about 25 bases, from about 16 bases up to about 24 bases, from about 17 bases up to about 23 bases, from about 18 bases up to about 22 bases, and from about 19 bases up to about 21 bases. As set forth above, typically about 20 bases are used herein for the overlapping region.

[0566] J. Uses of the Mutant IFNα, IFNβ Genes and Cytokines in Therapeutic Methods

[0567] The optimized cytokines provided herein, such as the IFNα-2b and IFNβ proteins and other modified cytokines, are intended for use in various therapeutic as well as diagnostic methods. These include all methods for which the unmodified proteins are used. By virtue of their improved phenotypes and activities, the proteins provided herein should exhibit improvement in the corresponding in vivo phenotype.

[0568] In particular, the optimized cytokines, such as the IFNα-2b and IFNβ proteins, are intended for use in therapeutic methods in which cytokines have been used for treatment. Such methods include, but are not limited to, methods of treatment of infectious diseases, allergies, microbial diseases, pregnancy related diseases, bacterial diseases, heart diseases, viral diseases, histological diseases, genetic diseases, blood related diseases, fungal diseses, adrenal diseases, cancers, liver diseases, autoimmune diseases, growth disorders, diabetes, neurodegenerative diseases, including mulitiple sclerosis, Parkinson's disease and Alzheimer's disease.

[0569] 1) Fusion Proteins

[0570] Fusion proteins containing a targeting agent and mutant IFNα, including IFNα-2b and IFNα-2a, and IFNβ mutant proteins, or cytokine protein also are provided. Pharmaceutical compositions containing such fusion proteins formulated for administration by a suitable route are provided. Fusion proteins are formed by linking in any order the mutant protein and an agent, such as an antibody or fragment thereof, growth factor, receptor, ligand and other such agent for directing the mutant protein to a targeted cell or tissue. Linkage can be effected directly or indirectly via a linker. The fusion proteins can be produced recombinantly or chemically by chemical linkage, such as via heterobifunctional agents or thiol linkages or other such linkages. The fusion proteins can contain additional components, such as E. coli maltose binding protein (MBP) that aid in uptake of the protein by cells (see, International PCT application No. WO 01/32711).

[0571] 2) Nucleic Acid Molecules for Expression

[0572] Nucleic acid molecules encoding the mutant cytokines including the mutant IFNβ proteins and IFN α proteins, such as the IFNα-2b and IFNα-2a proteins, provided herein, or the fusion protein operably linked to a promoter, such as an inducible promoter for expression in mammalian cells also are provided. Such promoters include, but are not limited to, CMV and SV40 promoters; adenovirus promoters, such as the E2 gene promoter, which is responsive to the HPV E7 oncoprotein; a PV promoter, such as the PBV p89 promoter that is responsive to the PV E2 protein; and other promoters that are activated by the HIV or PV or oncogenes.

[0573] The mutant cytokines including the mutant interferons (IFNα's and IFNβ′) proteins provided herein, also can be delivered to the cells in gene transfer vectors. The transfer vectors also can encode encode additional other therapeutic agent(s) for treatment of the disease or disorder, such cancer or HIV infection, for which the cytokine is administered.

[0574] 3) Formulation of Optimized Cytokines and Methods of Treatment

[0575] Pharmaceutical compositions containing an optimized cytokine produced herein, such as IFNα-2b, IFNα-2a and IFNβ, fusion proteins or encoding nucleic acid molecules can be formulated in any conventional manner by mixing a selected amount of an optimized cytokine with one or more physiologically acceptable carriers or excipients. Selection of the carrier or excipient depends upon the mode of administration (i.e., systemic, local, topical or any other mode) and disorder treated. The pharmaceutical compositions provided herein can be formulated for single dosage administration. The concentrations of the compounds in the formulations are effective for delivery of an amount, upon administration, that is effective for the intended treatment. Typically, the compositions are formulated for single dosage administration. To formulate a composition, the weight fraction of a compound or mixture thereof is dissolved, suspended, dispersed or otherwise mixed in a selected vehicle at an effective concentration such that the treated condition is relieved or ameliorated. Pharmaceutical carriers or vehicles suitable for administration of the compounds provided herein include any such carriers known to those skilled in the art to be suitable for the particular mode of administration.

[0576] In addition, the compounds may be formulated as the sole pharmaceutically active ingredient in the composition or may be combined with other active ingredients. Liposomal suspensions, including tissue-targeted liposomes, may also be suitable as pharmaceutically acceptable carriers. These may be prepared according to methods known to those skilled in the art. For example, liposome formulations may be prepared as described in U.S. Pat. No. 4,522,811.

[0577] The active compound is included in the pharmaceutically acceptable carrier in an amount sufficient to exert a therapeutically useful effect in the absence of undesirable side effects on the patient treated. The therapeutically effective concentration may be determined empirically by testing the compounds in known in vitro and in vivo systems, such as the assays provided herein. The active compounds can be administered by any appropriate route, for example, orally, parenterally, intravenously, intradermally, subcutaneously, or topically, in liquid, semi-liquid or solid form and are formulated in a manner suitable for each route of administration.

[0578] The optimized cytokine and physiologically acceptable salts and solvates can be formulated for administration by inhalation (either through the mouth or the nose) or for oral, buccal, parenteral or rectal administration. For administration by inhalation, the optimized cytokine can be delivered in the form of an aerosol spray presentation from pressurized packs or a nebulizer, with the use of a suitable propellant, e.g., dichlorodifluoromethane, trichlorofluoromethane, dichlorotetrafluorethane, carbon dioxide or other suitable gas. In the case of a pressurized aerosol the dosage unit can be determined by providing a valve to deliver a metered amount. Capsules and cartridges of e.g., gelatin for use in an inhaler or insufflator can be formulated containing a powder mix of a therapeutic compound and a suitable powder base such as lactose or starch.

[0579] For oral administration, the pharmaceutical compositions can take the form of, for example, tablets or capsules prepared by conventional means with pharmaceutically acceptable excipients such as binding agents (e.g., pregelatinized maize starch, polyvinylpyrrolidone or hydroxypropyl methylcellulose); fillers (e.g., lactose, microcrystalline cellulose or calcium hydrogen phosphate); lubricants (e.g., magnesium stearate, talc or silica); disintegrants (e.g., potato starch or sodium starch glycolate); or wetting agents (e.g., sodium lauryl sulphate). The tablets can be coated by methods well known in the art. Liquid preparations for oral administration can take the form of, for example, solutions, syrups or suspensions, or they can be presented as a dry product for constitution with water or other suitable vehicle before use. Such liquid preparations can be prepared by conventional means with pharmaceutically acceptable additives such as suspending agents (e.g., sorbitol syrup, cellulose derivatives or hydrogenated edible fats); emulsifying agents (e.g., lecithin or acacia); non-aqueous vehicles (e.g., almond oil, oily esters, ethyl alcohol or fractionated vegetable oils); and preservatives (e.g., methyl or propyl-p-hydroxybenzoates or sorbic acid). The preparations can also contain buffer salts, flavoring, coloring and sweetening agents as appropriate.

[0580] Preparations for oral administration can be suitably formulated to give controlled release of the active compound. For buccal administration the compositions can take the form of tablets or lozenges formulated in conventional manner.

[0581] The optimized cytokine can be formulated for parenteral administration by injection e.g., by bolus injection or continuous infusion. Formulations for injection can be presented in unit dosage form e.g., in ampoules or in multi-dose containers, with an added preservative. The compositions can take such forms as suspensions, solutions or emulsions in oily or aqueous vehicles, and can contain formulatory agents such as suspending, stabilizing and/or dispersing agents. Alternatively, the active ingredient can be in powder-lyophilized form for constitution with a suitable vehicle, e.g., sterile pyrogen-free water, before use.

[0582] In addition to the formulations described previously, the optimized cytokine also can be formulated as a depot preparation. Such long acting formulations can be administered by implantation (for example, subcutaneously or intramuscularly) or by intramuscular injection. Thus, for example, the therapeutic compounds can be formulated with suitable polymeric or hydrophobic materials (for example as an emulsion in an acceptable oil) or ion exchange resins, or as sparingly soluble derivatives, for example, as a sparingly soluble salt.

[0583] The active agents can be formulated for local or topical application, such as for topical application to the skin and mucous membranes, such as in the eye, in the form of gels, creams, and lotions and for application to the eye or for intracisternal or intraspinal application. Such solutions, particularly those intended for ophthalmic use, can be formulated as 0.01% -10% isotonic solutions, pH about 5-7, with appropriate salts. The compounds can be formulated as aerosols for topical application, such as by inhalation (see, e.g., U.S. Pat. Nos. 4,044,126, 4,414,209, and 4,364,923, which describe aerosols for delivery of a steroid useful for treatment inflammatory diseases, particularly asthma).

[0584] The concentration of active compound in the drug composition will depend on absorption, inactivation and excretion rates of the active compound, the dosage schedule, and amount administered as well as other factors known to those of skill in the art. For example, the amount that is delivered is sufficient to treat the symptoms of hypertension.

[0585] The compositions, if desired, can be presented in a package, in kit a or dispenser device, that can contain one or more unit dosage forms containing the active ingredient. The package, for example, contains metal or plastic foil, such as a blister pack. The pack or dispenser device can be accompanied by instructions for administration. The compositions containing the active agents can be packaged as articles of manufacture containing packaging material, an agent provided herein, and a label that indicates the disorder for which the agent is provided.

[0586] Methods of treatment of cytokine-mediated or cytokine-involved diseases and immunotherapeutic methods are provided. The modified cytokines can be used in any method of treatment for which the unmodified cytokine is used. Hence the modified cytokines can be used for treatment of all disorders noted herein for the respective cytokines and for those known to those of skill in the art for each of the others, such as immunotherapeutic treatment (interleukins) and red blood cell expansion and stem cell expansion. The following table summarizes exemplary uses in addition to those noted herein of exemplary modified cytokines provided herein:

| Cytokine | Exemplary Uses, Diseases and Treatment |
|---|---|
| IL-10 | anti-inflammatory treatment of chronic liver injury and |
| | disease; myeloma |
| Interferon-gamma | interstitial/idiopathic pulmonary fibrosis; adjunctive |
| | immunotherapy for immunosupressed patients |
| Granulocyte | Crohn's disease; cardiac disease; acquired and |
| colony | congenital neutropenias; asthma |
| stimulating factor | |
| Leukemia | myocardial infarction; multiple sclerosis; prevention of |
| inhibitory | axonal atrophy; olfactory epithelium replacement |
| factor | stimulation |
| Human growth | growth hormone deficiency; acromegaly |
| hormone | |
| Ciliary | retinal degeneration treatments; neurodegnerative |
| neurotrophic | diseases such as Huntingtons; auditory degenerative |
| factor | diseases |
| Leptin | obesity; pancreatitis; endometreosis |
| Oncostatin M | chronic infammatory diseases; rheumatoid arthritis; |
| | multiple sclerosis; tissue damage supression |
| Interleukin-6 | protection from liver injury; Crohn's disease; |
| | hematopoietic associated diseases |
| Interleukin-12 | coksakievirus treatment; neuroblastoma; melanoma, |
| | renal cell carcinoma; mucosal immunity induction |
| Erythropoietin | hypoxia; myocardial ischemia; anemia with renal |
| | failure and cancer treatments |
| Granulocyte- | stimulate antigen presenting cells; anti-tumor activity |
| macrophage | for leukemia, melanoma, and breast, liver and renal |
| colony | cell carcinomas; adjunctive immunotherapy for |
| stimulating factor | immunosupressed patients; automimmune disease |
| Interleukin-2 | immune reactivation after chemotherapy; melanoma; |
| | colon carcinoma |
| Interleukin-3 | leukemia cell targeting; motor neuropathy; |
| | amyotrophic lateral sclerosis; asthma |
| Interleukin-4 | allergic asthma; lupus |
| Interleukin-5 | treatment for parasites; asthma; allergic diseases |
| | accompanied by eosinophilia |
| Interleukin-13 | intracellular infections; B-cell cancers; asthma |
| Flt3 ligand | prostatate cancer; myeloid leukemia; engraftment of |
| | allogenic hematopietic stem cells |
| Stem cell factor | hepatic injury; asthma; hematopoietic engraftment |

[0587] Treatment can be effected by any suitable route of administration using suitable formulations. If necessary, a particular dosage and duration and treatment protocol can be empirically determined or extrapolated.

### K. EXAMPLES

[0588] The following examples are included for illustrative purposes only and are not intended to limit the scope of the invention. The specific methods exemplified can be practiced with other species. The examples are intended to exemplify generic processes.

### Example 1

[0589] This example describes a plurality of chronological steps including steps from (i) to (viii):

[0590] (i) cloning of IFNα cDNA in a mammalian cell expression plasmid (section A.1)

[0591] (ii) generation of a collection of targeted mutants on the IFNα cDNA in the mammalian cell expression plasmid (section B)

[0592] (iii) production of IFNα mutants in mammalian cells (section C.1)

[0593] (iv) screening and partial in vitro characterization of IFNα mutants produced in mammalian cells in search of lead mutants (section D)

[0594] (v) cloning of the lead mutants into a bacterial cell expression plasmid (section A.2)

[0595] (vi) expression of lead mutants in bacterial cells (section C.2)

[0596] (vii) in vitro characterization of lead mutants produced in bacteria (section D)

[0597] (viii) in vivo characterization of lead mutants produced in bacteria (section E).

[0598] A. Cloning of IFNα-2b Encoding cDNA

[0599] A.1. Cloning of IFN α-2b cDNA in a Mammalian Cell Expression Plasmid

[0600] The IFN α-2b cDNA was first cloned into an mammalian expression vector, prior to the generation of the selected mutations. A collection of mutants was then generated such that each individual mutant was created and processed individually, physically separated form each other and in addressable arrays. The mammalian expression vector pSSV9 CMV 0.3 pA was engineered as follows:

[0601] The pSSV9 CMV 0.3 pA was cut by Pvull and religated (this step gets rid of the ITR functions), prior to the introduction of a new EcoRI restriction site by Quickchange mutagenesis (Stratagene). The oligonucleotides primers were:

| | |
|---|---|
| EcoRI forward primer 5′-GCCTGTATGATTTATTGGATGTTGGAATTCG- | (SEQ ID NO: 218) |
| CTGATGCGGTATTTTCTCCTTACG-3′ | |
| EcoRI reverse primer 5′-CGTAAGGAGAAAATACCGCATCAGGGAATT- | (SEQ ID NO: 219) |
| CCAACATCCAATAAATCATACAGGC-3′. | |

[0602] The construct sequence was confirmed by using the following oligonucleotides:

| | |
|---|---|
| Seq Clal forward primer: 5′-CTGATTATCAACCGGGGTACATATGATTGAC-ATGC-3′ | (SEQ ID NO: 220) |
| Seq Xmnl reverse primer 5′-TACGGGATAATACCGCGCCACATAGCAGAA-C-3′. | (SEQ ID NO: 221) |

[0603] Then, the Xmnl-Clal fragment containing the newly introduced EcoRI site was cloned into pSSV9 CMV 0.3 pA (SSV9 is a clone containing the entire adeno-associated virus (AAV) genome inserted into the Pvull site of plasmid pEMBL (see, Du et al. (1996) Gene Ther 25 3:254-261)) to replace the corresponding wild-type fragment and produce construct pSSV9-2EcoRl.

[0604] The DNA sequence of the IFNα-2b cDNA, which was inserted into the mammalian vector pDG6 (ATCC accession No. 53169), was confirmed using a pair of internal primers. The sequences of the IFNα-2b-related oligonucleotides for sequencing follow:

| | |
|---|---|
| Seq forward primer: | (SEQ ID NO: 222) |
| 5′-CCTGATGAAGGAGGACTC-3′ | |
| Seq reverse primer: | (SEQ ID NO: 223) |
| 5′-CCAAGCAGCAGATGAGTC-3′. | |

[0605] Since the beginning of the IFNα-2b encoding cDNA (the signal peptide encoding sequence) is absent in pDG6, it was added using the oligonucleotide (see below)to the amplified gene. First, the IFNα-2b cDNA was amplified by PCR using pDG6 as template using the following oligonucleotides as primers:

| | |
|---|---|
| IFNα-2b 5′ primer 5′-TCAGCTGCAAGTCAAGCTGCTGTGTGGGCTG-3′ | (SEQ ID NO: 224) |
| IFNα-2b 3′ primer 5′-GCTCTAGATCATTCCTTACTTCTTAAACTTTC-TTGCAAGTTTGTTGAC-3′ | (SEQ ID NO: 225) |

[0606] The PCR product was then used in an overlapping PCR using the following oligonucleotide sequences, having Hind III or Xbal restriction sites (underlined) or the DNA sequence missing in pDG6 (underlined):

| | |
|---|---|
| IFNα-2b HindIII primer 5′-CCCAAGGTTATGGCCTTGACCTTTGCTTTACT-GGTG-3′ | (SEQ ID NO: 226) |
| IFNα-2b Xbal primer 5′-GCTCTAGATCATTCCTTACTTCTTAAACTTTC-TTGCAAGTTTGTTGAC-3′ | (SEQ ID NO: 227) |
| IFNα-2b 80bp 5′ primer 5′-CCCAAGCTTATGGCCTTGACCTTTGCTTTA- | (SEQ ID NO: 228) |
| CTGGTGGCCCTCCTGGTGCTCAGCTGCAAGTCAAGGTGCTCTGTGGGCTG-3′. | |

[0607] The entire IFNα-2b cDNA was cloned into the pTOPO-TA vector (Invitrogen). After checking gene sequence by automatic DNA sequencing, the HindIII-Xbal fragment containing the gene of interest was subcloned into the corresponding sites of pSSV9-2EcoRl to produce pAAV-EcoRl-IFNalpha-2b (pNB-AAV-IFN alpha-2b).

[0608] A.2 Cloning of the IFN α-2b Leads in an E. coli Expression Plasmid

[0609] A.2.1 Characterization of the Bacterial Cells

[0610] BL21-CodonPlus(DE3)-RP® competent Escherichia coli cells are derived from Stratagene's high-performance BL21-Gold competent cells.

[0611] These cells enable efficient high-level expression of heterologous proteins in E. coli. Efficient production of heterologous proteins in E. coli is frequently limited by the rarity, in E.coli, of certain tRNAs that are abundant in the organisms from which the heterologous proteins are derived. Availability of tRNAs allows high-level expression of many heterologous recombinant genes in BL21-Codon Plus cells that are poorly expressed in conventional BL21 strains.BL21-CodonPLus(DE3)-RP cells contain a ColE1-compatible, pACYC-based plasmid containing extra copies of the argu and proL tRNA genes.

[0612] A.2.2 Cloning of Wild-Type IFN α

[0613] To express IFN α-2b in E. coli cDNA encoding the mature form of IFN-2 a-2b was finally cloned into the plasmid pET-11 (Novagen). Briefly, this cDNA fragment was amplified by PCR using the primers SEQ ID Nos. 1306 and 1305, respectively:

FOR-IFNA-5′
AACATATGTGTGATCTG CCTCAAACCCACAGCCTGGGTAGC 3′
REV-IFNA-5′
AAGGATCCTCATTCCTTACTTCTTAAACTTTCTTGCAAGTTTGTTG 3′,

[0614] from pSSV9-EcoRl-IFN α-2b (see above), which contains full-length IFN-2 alpha cDNA as a matrix, using Herculase DNA-polymerase (Stratagene). The PCR fragment was subcloned into pTOPO-TA vector (Invitrogen) yielding pTOPO-IFN α-2b. The sequence was verified by sequencing. pET11 IFN α-2b was prepared by insertion of the Ndel-Bam HI (Biolabs) fragment from pTOPO-IFN α-2b into the Ndel-Bam HI sites of pET 11. The DNA sequence of the resulting pET 11-IFN α-2b construct was verified by sequencing and the plasmid was used for IFN α-2b expression in E. coli.

[0615] A.2.3 Cloning of IFN α-2b mutants from the mammalian expression plasmid into the E.coli expression plasmid

[0616] Lead mutants of Interferon alpha were first generated in the pSSV9-IFNα-EcoRl plasmid. With the only exception of E159H and E159Q, all mutants were amplified using the primers below. Primers contained Ndel (in Forward) and BamHI (in Reverse) restriction sites:

| | |
|---|---|
| FOR-IFNA-5′ AACATATGTGTGATCTGCCTCAAACCCACAGCCTGGGTAGC 3′; | (SEQ ID No. 1306 |
| and | |
| REV-IFNA-5′ AAGGATCCTCATTCCTTACTTCTTAAACTTTCTTGCAAGTTTGTTG 3′ | (SEQ ID No. 1305) |

[0617] Mutants E159H and E159Q were amplified using the following primers on reverse side (primer forward was the same than described above):

[0618] REV-IFNA-E 159H-5′ AAGGATCCTCATTCCTTACTTCTTAAACTGTGTTGCAAGTTTGTTG 3′ SEQ ID No. 1304 above; and

| | |
|---|---|
| REV-IFNA-E159H-5′ AAGGATCCTCATTCCTTACTTCTTAAACTGTGTTGCAAGTTTGTTG 3′ | SEQ ID No. 1304 |
| above; and | |
| REV-IFNA-E159Q-5′ AAGGATCCTCATTCCTTACTTCTTAAACTCTGTTGCAAGTTTGTTG 3′. | SEQ ID No. 1305 |

[0619] Mutants were amplified with Pfu Turbo Polymerase (Stratagene) according. PCR products were cloned into pTOPO plasmid (Zero Blunt TOPO PCR cloning kit, Invitrogen). The presence of the desired mutations was checked by automatic sequencing. The Ndel+BamHI fragment of the pTOPO-IFNa positive clones was then cloned into Ndel+BamHI sites of the pET11 plasmid.

[0620] B. Construction of a Collection of IFNα-2b Mutants in a Mammalian Expression Plasmid

[0621] A series of mutagenic primers was designed to generate the appropriate site-specific mutations in the IFNα-2b cDNA. Mutagenesis reactions were performed with the Chameleon® mutagenesis kit (Stratagene) using pNB-AAV-IFNα-2b as the template. Each individual mutagenesis reaction was designed to generate one single mutant protein. Each individual mutagenesis reaction contains one and only one mutagenic primer. For each reaction, 25 pmoles of each (phosphorylated) mutagenic primer were mixed with 0.25 pmoles of template, 25 pmoles of selection primer (introducing a new restriction site), and 2 μl of 10× mutagenesis buffer (100 mM Tris-acetate pH 7.5; 100 mM MgOAc; 500 mM KOAc pH 7.5) into each well of 96 well-plates. To allow DNA annealing, PCR plates were incubated at 98° C. during 5 min and immediately placed 5 min on ice, before incubating at room temperature during 30 min. Elongation and ligation reactions were allowed by addition of 7 μl of nucleotide mix (2.86 mM each nucleotide; 1.43× mutagenesis buffer) and 3 μl of a freshly prepared enzyme mixture of dilution buffer (20 mM Tris HCl pH7.5; 10 mM KCl; 10 mM β-mercaptoethanol; 1 mM DTT; 0.1 mM EDTA; 50% glycerol), native T7 DNA polymerase (0.025 U/μl), and T4 DNA ligase (1 U/μl) in a ratio of 1:10, respectively. Reactions were incubated at 37° C. for 1 h before inactivation of T4 DNA ligase at 72° C. during 15 min. In order to eliminate the parental plasmid, 30 μl of a mixture containing 1× enzyme buffer and 10 U of restriction enzyme was added to the mutagenic reactions followed by incubation at 37° C. for at least 3 hours. Next, 90 μl aliquots of XLmutS competent cells (Stratagene) containing 25 mM, β-mercaptoethanol were place in ice-chilled deep-well plates. Then, plates were incubated on ice for 10 min with gentle vortex every 2 min. Transformation of competent cells was performed by adding aliquots of the restriction reactions (1/10 of reaction volume) and incubating on ice for 30 min. A heat pulse was performed in a 42° C. water bath for 45 s, followed by incubation on ice for 2 minutes. Preheated SOC medium (0.45 ml) was added to each well and plates were incubated at 37° C. for 1 h with shaking. In order to enrich for mutated plasmids, 1 ml of 2×YT broth medium supplemented with 100 μg/ml ampicillin was added to each transformation mixture followed by overnight incubation at 37° C. with shaking. Plasmid DNA isolation was performed by alkaline lysis using Nucleospin Multi-96 Plus Plasmid Kit (Macherey-Nagel) according to the manufacturer's instructions. Selection of mutated plasmids was performed by digesting 500 μg of plasmid preparation with 10 U of selection endonuclease in an overnight incubation at 37° C. A fraction of the digested reactions (1/10 of the total volume) was transformed into 40 μl of Epicurian coli XL1 -Blue competent cells (Stratagene) supplemented with 25 mM β-mercaptoethanol.

[0622] Transformation was performed was as described above. Transformants were selected on LB-ampicillin agar plates incubated overnight at 37° C. Isolated colonies were picked up and grown overnight at 37° C. into deep-well plates. Four clones per reaction were screened by endonuclease digestion of a new restriction site introduced by the selection primer. Finally, each mutation that was introduced to produce this collection of candidate LEAD IFNα-2b mutant plasmids encoding the proteins set forth in Table 2 of Example 2 was confirmed by automatic DNA sequencing.

[0623] C. Production of IFNa-2b Mutants

[0624] C.1 In Mammalian Cells

[0625] IFNα-2b mutants were produced in 293 human embryo kidney (HEK) cells (obtained from ATCC), using Dubelcco's modified Eagle's medium supplemented with glucose (4.5 g/L; Gibco-BRL) and fetal bovine serum (10%, Hyclone). Cells were transiently transfected with the plasmids encoding the IFNα-2b mutants as follows: 0.6×10⁵ cells were seeded into 6 well-plates and grown for 36 h before transfection Confluent cells at about 70%, were supplemented with 2.5 μg of plasmid (IFNα-2b mutants) and 10 mM poly-ethylene-imine (25 KDa PEI, Sigma-Aldrich). After gently shaking, cells were incubated for 16 h. Then, the culture medium was changed with 1 ml of fresh medium supplemented with 1% of serum. IFNα-2b was measured on culture supernatants obtained 40 h after transfection and stored in aliquots at −80° C. until use.

[0626] Supernatants containing IFNα-2b from transfected cells were screened following sequential biological assays as follows. Normalization of IFNα-2b concentration from culture supernatants was performed by enzyme-linked immunoabsorbent assay (ELISA) using a commercial kit (R & D) and following the manufacturer's instructions. This assay includes plates coated with an IFNα-2b monoclonal antibody that can be developed by coupling a secondary antibody conjugated to the horseradish peroxidase (HRP). IFNα-2b concentrations on samples containing (i) wild type IFNα-2b produced under comparable conditions as the mutants, (ii) the IFNα-2b mutants and (iii) control samples(produced from cells expressing GFP) were estimated by using an international reference standard provided by the NIBSC, UK.

[0627] C.2 In Bacteria

[0628] A volume of 200 ml of culture medium (LB/Ampicillin/Chloramphenicol) was inoculated with 5 ml of pre-culture BL21-pCodon+-pET-IFN α-2b muta overnight at 37° C. with constant shaking (225 rpm). The production of IFN α-2b was induced by the addition of 50 μl of 2M IPTG at DO_{600 nm}˜0.6.

[0629] The culture was continued for 3 additional hours and was centrifuged at 4° C and 5000 g for 15 minutes. The supernatant (culture medium) was discarded and bacteria were lysed in 8 ml of lysis buffer by thermal shock (freezing-thawing: 37° C.-15 min; −80° C.-10 min; 37° C.-15 min; −80° C.-10 min; 37° C.-15 min). After centrifugation (10000 g, 15 min, 4° C.), the supernatant (soluble proteins fraction) was discarded, and the precipitated material (insoluble protein fraction containing the IFN α-2b protein as inclusion bodies) was purified.

[0630] C.3 Pre-purification of IFN α-2b as inclusion bodies in E. coli

[0631] C.3.1 Washing of Inclusion Bodies by Sonication

[0632] Pellets containing the inclusion bodies were suspended in 10 ml of buffer and sonicated (80 watts) on ice, 1 second “on,” 1 second “off” for a total of 4 min. Suspensions were then centrifuged (4° C., 10000 g, 15 min), and supernatants were recovered. Pellets were resuspended in 10 ml of buffer for a new sonication/centrifugation cycle. Triton X-100 was then eliminated by two additional cycles of sonication/centrifugation with buffer. Pellets containing the inclusion bodies were recovered and dissolved. The washed supernatants were stored at 4° C.

[0633] C.3.2 Solubilization of Inclusion Bodies by Denaturation

[0634] Once washed, the inclusion bodies were solubilized in buffer at a concentration estimated in 0.3 mg/ml measuring the OD₂₈₀ (considering the coefficient of molar extinction of IFN α-2b). Solubilization was carried out overnight at 4° C., under shaking.

[0635] C.3.3 Renaturation of IFN α-2b by Dialysis of GdnHCl

[0636] Samples contained 1 mg of protein at 0.3 mg/ml (5 ml in total) in buffer. The GdnHCl (Hydrochloride Guanidium) present in the samples was eliminated by dialysis (minimum membrane cut=10 kDa) overnight at 4° C. against buffer (1litre) (final concentration of GdnHCl:43 Mm). Next, samples were further dialysed against 1 litre of buffer during 2:30 h. This step was repeated two additional times. After dialysis, very little precipitate was visible.

[0637] D. Screening and In Vitro Charaterization of IFN α-2b Mutants

[0638] Two activities were measured directly on IFN samples: antiviral and antiproliferation activities. Dose (concentration)-response (activity) experiments for antiviral or antiproliferation activity permitted calculation of the ‘potency’ for antiviral and antiproliferation activities, respectively. Antiviral and antiproliferation activities also were measured after incubation with proteolytic samples, such as specific proteases, mixtures of selected proteases, human serum or human blood. Assessment of activity following incubation with proteolytic samples allowed to determine the residual (antiviral or antiproliferation) activity and the respective kinetics of half-life upon exposure to proteases.

[0639] D.1. Antiviral Activity

[0640] IFNα-2b protects cells against viral infection by a complex mechanism devoted to create an unfavorable environment for viral proliferation. Cellular antiviral response due to IFNα-2b (IFN anti-viral assay) was assessed using an interferon-sensitive HeLa cell line (ATCC accession no. CCL-2) treated with the encephalomyocarditis virus (EMCV). The assessment of either the virus-induced cytopathic effects (CPE) or the amount of EMCV mRNA in extracts of infected cells by RT-PCR was used to determine IFNα activity in samples.

[0641] D.1.1 Antiviral Activity—Measure by RT-qPCR

[0642] Confluent cells were trypsinized and plated at density 2×10⁴ cells/well in DMEM 5% SVF medium (Day 0). Cells were incubated with IFN α-2b (at a concentration of 500 U/ml) to get 500 pg/ml and 150 pg/well (100 μl of IFN solution), during 24 h at 37° C. prior to be challenged with EMCV (1/1000 dilution; MOI 100). After an incubation of 16 h, when virus-induced CPE was near maximum in untreated cells, the number of EMCV particles in each well was determined by RT-PCR quantification of EMCV mRNA, using lysates of infected cells. RNA from cell extracts was purified after a DNAse/proteinase K treatment (Applied Biosystems). The CPE was evaluated using both Uptibleu (Interchim) and MTS (Promega) methods, which are based on detecting bio-reductions produced by the metabolic activity of cells in a flourometric and colorimetric manner, respectively. In order to produce a standard curve for EMCV quantification, a 22 bp DNA fragment of the capsid protein-cDNA was amplified by PCR and cloned into pTOPO-TA vector (Invitrogen). Next, RT-PCR quantification of known amounts of pTOPO-TA-EMCV capsid gene was performed using the One-step RT-PCR kit (Applied Biosystems) and the following EMCV-related (cloning) oligonucleotides and probe:

| | |
|---|---|
| EMCV forward primer 5′-CCCCTACATTGAGGCATCCA-3′ | (SEQ ID NO: 229) |
| EMCV reverse primer 5′-CAGGAGCAGGACAAGGTCACT-3′ | (SEQ ID NO: 230) |
| EMCV probe 5′-(FAM)CAGCCGTCAAGACCCAACCGCT(TAMR A)-3′. | (SEQ ID NO: 231) |

[0643] D.1.2 Antiviral Activity—Measure by CPE

[0644] Antiviral activity of IFN α-2b was determined by the capacity of the cytokine to protect Hela cells against EMC (mouse encephalomyocarditis) virus-induced cytopathic effects. The day before, Hela cells (2×10⁵ cells/ml) were seeded in flat-bottomed 96-well plates containing 100 μl/well of Dulbecco's MEM-Glutamaxl-sodium pyruvate medium supplemented with 5% SVF and 0.2% of gentamicin. Cells were growth at 37° C. in an atmosphere of 5% CO₂ for 24 hours.

[0645] Two-fold serial dilutions of interferon samples were made with MEM complete media into 96-Deep-Well plates with final concentration ranging from 1600 to 0.6 pg/ml. The medium was aspirated from each well and 100 μl of interferon dilutions were added to Hela cells. Each interferon sample dilution was assessed in triplicate. The two last rows of the plates were filled with 100 μl of medium without interferon dilution samples in order to serve as controls for cells with and without virus.

[0646] After 24 hours of growth, a 1/1000 EMC virus dilution solution was placed in each well except for the cell control row. Plates were returned to the CO₂ incubator for 48 hours. Then, the medium was aspirated and the cells were stained for 1 hour with 100 μl of Blue staining solutio to determine the proportion of intact cells. Plates were washed in a distilled water bath. The cell bound dye was extracted using 100 μl of ethylene-glycol mono-ethyl-ether (Sigma). The absorbance of the dye was measured using an Elisa plate reader (Spectramax). The antiviral activity of IFN α-2b samples (expressed as number of IU/mg of proteins) was determined as the concentration needed for 50% protection of the cells against EMC virus-induced cytopathic effects. For proteolysis experiments, each point of for the kinetic measurements was assessed at 500 and 166 pg/ml in triplicate.

[0647] D.2 Antiproliferation Activity

[0648] Anti-proliferative activity of interferonα-2b was determined by the capacity of the cytokine to inhibit proliferation of Daudi cells. Daudi cells (1×10⁴ cells) were seeded in flat-bottomed 96-well plates containing 50 μl/well of RPMI 1640 medium supplemented with 10% SVF, 1×glutamin and 1 ml of gentamicin. No cell was added to the last row (“H” row) of the flat-bottomed 96-well plates in order to evaluate background absorbance of culture medium.

[0649] At the same time, two-fold serial dilutions of interferon samples were made with RPMI 1640 complete media into 96-Deep-Well plates with final concentration ranging from 6000 to 2.9 pg/ml. Interferon dilutions (50 μl) were added to each well containing 50 μl of Daudi cells. The total volume in each well should now be 100 μl. Each interferon sample dilution was assessed in triplicate. Each well of the “G” row of the plates was filled with 50 μl of RPMI 1640 complete media in order to be used as positive control. The plates are incubated for 72 hours at 37° C. in a humidified, 5% CO2 atmosphere.

[0650] After 72 hours of growth, 20 μl of Cell titer 96 Aqueous one solution reagent (Promega) was added to each well and incubated 1H30 at 37° C. in an atmosphere of 5% CO₂. To measure the amount of colored soluble formazan produced by cellular reduction of the MTS, the absorbance of the dye was measured using an Elisa plate reader (spectramax) at 490 nm.

[0651] The corrected absorbances (“H” row background value subtracted) obtained at 490 nm were plotted versus concentration of cytokine. The ED50 value was calculated by determining the X-axis value corresponding to one-half the difference between the maximum and minimum absorbance values. (ED50=the concentration of cytokine necessary to give one-half the maximum response).

[0652] D.3 Treatment of IFN α-2b with Proteolytic Preparations

[0653] Mutants were treated with proteases in order to identify resistant molecules. The resistance of the mutant IFN α-2b molecules compared to wild-type IFN α-2b against enzymatic cleavage (30 min, 25° C.) by a mixture of proteases (containing 1.5 pg of each of the following proteases (1% wt/wt, Sigma): α-chymotrypsin, carboxypeptidase, endoproteinase Arg-C, endoproteinase Asp-N, endoproteinase Glu-C, endoproteinase Lys-C, and trypsin) was determined. At the end of the incubation time, 10 μl of anti-proteases complete, mini EDTA free, Roche (one tablet was dissolved in 10 ml of DMEM and then diluted to 1/1000) was added to each reaction in order to inhibit protease activity. Treated samples were then used to determine residual antiviral or antiproliferation activities.

[0654] D.4 Protease Resistance—Kinetic Analysis

[0655] The percent of residual IFN α-2b activity over time of exposure to proteases was evaluated by a kinetic study using either (a) 15 pg of chymotrypsin (10% wt/wt), (b) a lysate of human blood at dilution 1/100, (c) 1.5 pg of protease mixture, or (d) human serum. Incubation times were: 0 h, 0.5 h, 1 h, 4 h, 8 h, 16 h, 24 h and 48 h. Briefly, 20 μl of each proteolytic sample (proteases, serum, bnlood) was added to 100 μl of IFN α-2b at 1500 pg/ml (500U/ml) and incubated for variable times, as indicated. At the appropriate time points, 10 μl of anti-proteases mixture, mini EDTA free, Roche (one tablet was dissolved in 10 ml of DMEM and then diluted to 1/500) was added to each well in order to stop proteolysis reactions. Biological activity assays were then performed as described for each sample in order to determine the residual activity at each time point.

[0656] D.5 Performance

[0657] The various biological activities, protease resistance and potency of each individual mutant were analyzed using a mathematical model and algorithm (NautScan™; described in French Patent No. 9915884; (published as International PCT application No. WO 01/44809 based on PCT n° PCT/FR00/03503). Data was processed using a Hill equation-based model that uses key feature indicators of the performance of each individual mutant. Mutants were ranked based on the values of their individual performance and those on the top of the ranking list were selected as leads.

[0658] E. Pharmacokinetics of Selected Lead Mutants in Mice

[0659] IFNα-2b mutants selected on the basis of their overall performance in vitro, were tested for pharmacokinetics in mice in order to have an indication of their half-life in blood in vivo. Mice were treated by subcutaneous (SC) injection with alicuots of each of a number of selected lead mutants. Blood was collected at increasing time points between 0.5 and 48 hs after injection. Inmediatedly after collection, 20 ml of anti-protease solution were added to each blood sample. Serum was obtained for further analysis.Residual IFN-α activity in blood was determined using the tests described in the precedent sections for in vitro characterization. Wild-type IFN α (that had been produced in bacteria under comparable conditions as the lead mutants) as well as a pegylated derivative of IFN α, Pegasys (Roche), also were tested for pharmacokinetics in the same experiments.

### Example 2

[0660] This example demonstrates the 2-dimensional (2D)scanning of IFNα-2b for increased resistance to proteolysis. For results, see FIGS. 6(A)-6(N), 6(T) and 6(U).

[0661] A) Identifying some or all possible target sites on the protein sequence that are susceptible to digestion by one or more specific proteases (these sites are the is-HITs).

[0662] Because IFNα-2b is administered as a therapeutic protein in the blood stream, a set of proteases was identified that were expected to broadly mimic the protease contents in serum. From that list of proteases, a list of the corresponding target amino acids was identified (shown in parenthesis) as follows: α-chymotrypsin (F, L, M, W, and Y), endoproteinase Arg-C (R), endoproteinase Asp-N (D), endoproteinase Glu-C (E), endoproteinase Lys-C (K), and trypsin (K and R) Carboxypeptidase Y, which cleaves non-specifically from the carboxy-terminal ends of proteins, was also included in the protease mixture. The distribution of the target amino acids over the protein sequence spreads over the complete length of the protein, suggesting that the protein is potentially sensitive to protease digestion all over its sequence (FIG. 6A). In order to restrict the number of is-HITs to a lower number of candidate positions, the 3-dimensional structure of the IFNα-2b molecule (PDB code 1RH2) was used to identify and select only those residues exposed on the surface, while discarding from the candidate list those which remain buried in the structure, and therefore stay less susceptible to proteolysis (FIG. 6B).

[0663] B) Identifying appropriate replacing amino acids, specific for each is-HIT, such that if used to replace one or more of the original, such as native, amino acids at that specific is-HIT, they can be expected to increase the is-HIT amino acid position's resistance to digestion by protease while at the same time, maintaining or improving the requisite biological activity of the protein (these replacing amino acids are the candidate LEADs).

[0664] To select the candidate replacing amino acids for each is-HIT position, PAM250 matrix based analysis was used (FIG. 7). In one embodiment, the two highest values in PAM250 matrix, corresponding to the highest occurrence of substitutions between residues (“conservative substitutions” or “accepted point mutations”), were chosen (FIG. 8). Whenever only a conservative substitution was available for a given high value of the PAM250, the following higher value was selected and the totality of conservative substitutions for this value was considered. The replacement of amino acids that are exposed on the surface by cysteine residues (as shown in FIG. 8, while replacing Y by H or I) was explicitly avoided, since this change would potentially lead to the formation of intermolecular disulfide bonds.

[0665] Thus, based on the nature of the challenging proteases, and on evolutionary considerations as well as protein structural analysis, a strategy was defined for the rational design of human IFNα-2b mutants having increased resistance to proteolysis which could produce therapeutic proteins having a longer half-life. By using the algorithm PROTEOL (see, e.g., infobiogen.fr), a list of residues along the IFNα-2b sequence was established, which can be recognized as a substrate for different enzymes present in the serum. Because the number of residues in this particular list was high, the 3-dimensional structure of IFNα-2b obtained from the NMR structure of IFNα-2a (PDB code 1ITF) was used to select only those residues exposed to the solvent. Using this approach, 42 positions were identified, which numbering is that of the mature protein (SEQ ID NO:1): L3, P4, R12, R13, M16, R22, K23, F27, L30, K31, R33, E41, K49, E58, K70, E78, K83, Y89, E96, E107, P109, L110, M111, E113, L117, R120, K121, R125, L128, K131, E132, K133, K134, Y135, P137, M148, R149, E159, L161, R162, K164, and E165. Each of these positions was replaced by amino acid residues, such that they are defined as compatible by the substitution matrix PAM250 while at the same time the replacement amino acids do not generate new sites for proteases.

[0666] The list of performed residue substitutions as determined by PAM250 analysis is as follows:

[0667] R to H, Q

[0668] E to H, Q

[0669] K to Q, T

[0670] L to V, I

[0671] M to I, V

[0672] P to A, S

[0673] Y to 1, H.

[0674] C) Systematically introducing the specific replacing amino acids (candidate LEADs) at every specific is-HIT position to generate a collection containing the corresponding mutant molecules.

[0675] The individual IFNα-2b mutants are generated, produced and phenotypically characterized one-by-one, in addressable arrays as set forth in Example 1, such that each mutant molecule contains initially amino acid replacements at only one is-HIT site. LEAD positions were obtained in IFNα-2b variants after a screening for protection against proteases, and comparing protease-untreated and protease-treated variant preparations with the corresponding conditions for the wild-type IFNα-2b. The percent of residual (anti-viral) activity for the IFNα-2b E113H variant after treatment with chymotrypsin, protease mixture, blood lysate or serum was compared to the treated wild-type IFNα-2b. Selected IFNα-2b LEADs are shown in Table 2.

[0676] A top and side view of IFNα-2b structure in ribbon representation (obtained from NMR structure of IFNα-2b, PDB code 1ITF) depict residues in “space filling” defining (1) the “receptor binding region” as deduced either by “alanine scanning” data and studies by Piehler et al., J. Biol. Chem., 275:40425-40433, 2000, and Roisman et al., Proc. Natl. Acad. Sci USA, 98:13231-13236, 2001, and (2) replacing residues (LEADs) for resistance to proteolysis.

TABLE 2
Selected LEADs of IFNα-2b following protease resistance

| | SEQ ID | Proteolysis | IFN antiviral |
|---|---|---|---|
| Mutant | No. | protection | activity |
| F27V | 83 | Pseudo wt | Pseudo wt |
| R33H | 86 | Pseudo wt | Pseudo wt |
| E41Q | 87 | Increased | Increased |
| E41H | 88 | Pseudo wt | Increased |
| E58Q | 89 | Increased | Pseudo wt |
| E58H | 90 | Increased | Increased |
| E78Q | 92 | Increased | Increased |
| E78H | 93 | Increased | Increased |
| Y89H | 1303 | Pseudo wt | Pseudo wt |
| E107Q | 95 | Increased | Pseudo wt |
| E107H | 96 | Increased | Pseudo wt |
| P109A | 97 | Pseudo wt | Pseudo wt |
| L110V | 98 | Pseudo wt | Pseudo wt |
| M111V | 978 | Pseudo wt | Pseudo wt |
| E113H | 101 | Increased | Pseudo wt |
| L117V | 102 | Increased | Pseudo wt |
| L117I | 103 | Increased | Pseudo wt |
| K121Q | 104 | Increased | Pseudo wt |
| R125H | 106 | Increased | Increased |
| R125Q | 107 | Increased | Increased |
| K133Q | 114 | Increased | Increased |
| E159H | 125 | Increased | Pseudo wt |
| E159Q | 124 | Increased | Pseudo wt |

### Example 3

[0677] Stabilization of IFNα-2b by Creation of N-Glycosylation Sites

[0678] The creation of N-glycosylation sites on the protein was a second strategy that was used to stabilize IFNα-2b Natural human IFNα-2b contains a unique O-glycosylation site at position 129 (the numbering corresponds to the mature protein; SEQ ID NO:1), however, no N-glycosylation sites are found in this sequence. N-glycosylation sites are defined by the N-X-S or N-X-T consensus sequences. Glycosylation has been found to play a role in protein stability. For example, glycosylation has been found to increase bioavailability via higher metabolic stability and reduced clearance. In order to generate more stable IFNα-2b variants, the N-glycosylation consensus sequences indicated above were introduced in the IFNα-2b sequence by mutagenesis. Variants of IFNα-2b carrying new glycosylation sites were assessed as previously described.

[0679] The structure of IFNα-2b is characterized by a helix bundle composed of 5 helices (A, B, C, D and E) connected with each other by a series of loops (a large AB loop and three shorter BC, CD, DE loops). The helices are joined together by two disulfide bridges between residues 1/98 and 29/138 of SEQ ID NO:1. The loops are contemplated herein to represent preferential sites for glycosylation given their exposure. Therefore, N-glycosylation sites (N-X-S or N-X-T) were created in each of the loop sequences (Table 3). Selected LEADs and pseudo wild-type IFNα-2b mutants after screening for addition of glycosylation sites are shown in Table 4.

TABLE 3
In silico HITs for addition of glycosylation sites on IFNα-2b

| | SEQ ID | | SEQ ID | |
|---|---|---|---|---|
| Codon No. | No. | N-X-S | No. | N-X-T |
| c2-4 | | D2N/P4S | | D2N/P4T |
| c3-5 | | L3N/Q5S | | L3N/Q5T |
| c4-6 | | P4N/T6S | | P4N/T6T |
| c5-7 | 127 | Q5N/H7S | 128 | Q5N/H7T |
| c6-8 | 129 | T6N/S8S | | T6N/S8T |
| c7-9 | | H7N/L9S | | H7N/L9T |
| c8-10 | 130 | S8N/G10S | 131 | S8N/G10T |
| c9-11 | | L9N/S11S | | L9N/S11T |
| c10-12 | 132 | M21N/R23S | | M21N/R23T |
| c22-24 | | R22N/I24S | | R22N/I24T |
| c23-25 | | R23N/S25S | 133 | R23N/S25T |
| c24-26 | 134 | I24N/L26S | | I24N/L26T |
| c25-27 | 135 | S25N/F27S | 136 | S25N/F27T |
| c26-28 | 137 | L26N/S28S | 138 | L26N/S28T |
| c28-30 | | S28N/L30S | | S28N/L30T |
| c30-32 | 139 | L30N/D32S | | L30N/D32T |
| c31-33 | | K31N/R33S | | K31N/R33T |
| c32-34 | | D32N/H34S | | D32N/H34T |
| c33-35 | 140 | R33N/D35S | 141 | R33N/D35T |
| c34-36 | 142 | H34N/F36S | 143 | H34N/F36T |
| c35-37 | 144 | D35N/G37S | | D35N/G37T |
| c36-38 | 145 | F36N/F38S | 146 | F36N/F38T |
| c37-39 | 147 | G37N/P39S | | G37N/P39T |
| c38-40 | 148 | F38N/Q40S | 149 | F38N/Q40T |
| c39-41 | 150 | P39N/E41S | 151 | P39N/E41T |
| c40-42 | 152 | Q40N/E42S | 153 | Q40N/E42T |
| c41-43 | | E41N/F43S | 155 | E41N/F43T |
| c42-44 | | E42N/G44S | | E42N/G44T |
| c43-45 | | F43N/N45S | | F43N/N45T |
| c44-46 | 156 | G44N/Q46S | 157 | G44N/Q46T |
| c45-47 | 158 | N45N/F47S | 159 | N45N/F47T |
| c46-48 | 160 | Q46N/Q48S | 161 | Q46N/Q48T |
| c47-49 | 162 | F47N/K49S | 163 | F47N/K49T |
| c48-50 | | Q48N/A50S | | Q48N/A50T |
| c49-51 | 164 | K49N/E51S | | K49N/E51T |
| c50-52 | | A50N/T52S | | A50N/T52T |
| c68-70 | | S68N/K70S | | S68N/K70T |
| c70-72 | | K70N/S72S | | K70N/S72T |
| c75-77 | 165 | A75N/D77S | | A75N/D77T |
| c77-79 | | D77N/T79S | | D77N/T79T |
| C100-102 | 166 | I100N/G102S | 167 | I100N/G102T |
| C101-103 | | Q101N/V103S | | Q101N/V103T |
| C102-104 | | G102N/G104S | | G102N/G104T |
| C103-105 | 168 | V103N/V105S | 169 | V103N/V105T |
| C104-106 | | G104N/T106S | 170 | G104N/T106T |
| C105-107 | 171 | V105N/E107S | | V105N/E107T |
| C10—-108 | 172 | T106N/T108S | 173 | T106N/T108T |
| C107-109 | 174 | E107N/P109S | 175 | E107N/P109T |
| C108-110 | | T108N/I110S | | T108N/I110T |
| C134-136 | | K134N/S136S | 176 | K134N/S136T |
| C154-156 | | S154N/N156S | | S154N/N156T |
| C155-157 | | T155N/L157S | | T155N/L157T |
| C156-158 | | N156N/Q158S | | N156N/Q158T |
| C157-159 | 177 | L157N/E159S | 178 | L157N/E159T |
| C158-160 | | Q158N/S160S | 179 | Q15BN/S160T |
| C159-161 | 180 | E159N/L161S | 181 | E159N/L161T |
| C160-162 | | S160N/R162S | | S160N/R162T |
| C161-163 | | L161N/S163S | | L161N/S163T |
| C162-164 | | R162N/K164S | | R162N/K164T |
| C163-165 | | S163N/E165S | | S163N/E165T |

[0680] TABLE 4
Selected LEADs and pseudo wild-type IFNα-2b mutants
after screening for addition of glycosylation sites

| | SEQ ID | Proteolysis | IFN antiviral |
|---|---|---|---|
| Mutant | No. | protection | activity |
| Q5N/H7S | 127 | Increased | Pseudo wt |
| Q5N/H7T | 128 | ND* | ND |
| P39N/E41S | 150 | Increased | Pseudo wt |
| P39N/E41T | 151 | Increased | Pseudo wt |
| Q40N/E42S | 152 | Increased | Pseudo wt |
| Q40N/E42T | 153 | Increased | Pseudo wt |
| E41N/F43S | 154 | Increased | Pseudo wt |
| E41N/F43T | 155 | Increased | Pseudo wt |
| F43N/N45S | | Increased | Pseudo wt |
| F43N/N45T | | ND | ND |
| G44N/Q46S | 156 | ND | ND |
| G44N/Q46T | 157 | Increased | Pseudo wt |
| N45N/F47S | 158 | Increased | Pseudo wt |
| N45N/F47T | 159 | Increased | Pseudo wt |
| Q46N/Q48S | 160 | Increased | Pseudo wt |
| Q46N/Q48T | 161 | ND | ND |
| F47N/K49S | 162 | Increased | Pseudo wt |
| F47N/K49T | 163 | Increased | Pseudo wt |
| I100N/G102S | 166 | Pseudo wt | Increased |
| I100N/G102T | 167 | Pseudo wt | Increased |
| V105N/E107S | 171 | Pseudo wt | Increased |
| V105N/E107T | | Pseudo wt | Increased |
| T106N/T108S | 172 | Pseudo wt | Increased |
| T106N/T108T | 173 | Pseudo wt | Increased |
| E107N/P109S | 174 | Pseudo wt | Increased |
| E107N/P109T | 175 | Pseudo wt | Increased |
| L157N/E159S | 177 | Pseudo wt | Increased |
| L157N/E159T | 178 | Pseudo wt | Increased |
| E159N/L161S | 180 | Pseudo wt | Increased |
| E159N/L161T | 181 | Pseudo wt | Increased |

*ND, not determined

### Example 4

### Redesign of Interferon α-2b Proteins

[0681] The use of the protein redesign approach provided herein permits the generation of proteins such that they maintain requisite levels and types of biological activity compared to the native protein while their underlying amino acid sequences have been significantly changed by amino acid replacement. To first identify those amino acid positions on the IFNα-2b protein that are involved or not involved IFNα-2b protein activity, such as binding activity of IFNα-2b to its receptor, an Ala-scan was performed on the IFNα-2b sequence. For this purpose, each amino acid in the IFNα-2b protein sequence was individually changed into Alanine. Any other amino acid, particularly another amino acid that has a neutral effect on structure, such as Gly or Ser, also can be used. Each resulting mutant IFNα-2b protein was then expressed and the antiviral activity of the individual mutants was assayed. The particular amino acid positions that are sensitive to replacement by Ala, referred to herein as HITs would in principle not be suitable targets for amino acid replacement to increase protein stability, because of their involvement in the activity of the molecule. For the Ala-scanning, the biological activity measured for the IFNα-2b molecules was: i) their capacity to inhibit virus replication when added to permissive cells previously infected with the appropriate virus and, ii) their capacity to stimulate cell proliferation when added to the appropriate cells. The relative activity of each individual mutant compared to the native protein was assayed. HITS are those mutants that produce a decrease in the activity of the protein (e.g., in this example, all the mutants with activities below about 30% of the native activity).

[0682] In addition, to identify the HIT positions, the Alanine-scan was used to identify the amino acid residues on IFNα-2b that when replaced with alanine lead to a ‘pseudo-wild type’ activity, i.e., those that can be replaced by alanine without leading to a decrease in biological activity.

[0683] A collection of mutant molecules was generated and phenotypically characterized such that IFNα-2b proteins with amino acid sequences different from the native ones but that still elicit the same level and type of activity as the native protein were selected. HITs and pseudo wild-type amino acid positions are shown in Table 5.

TABLE 5
HITs and pseudo wild-type positions to IFNα-2b redesign

| | SEQ ID | HITs | Pseudo wt |
|---|---|---|---|
| Mutants | No. | (viral activity) | (viral activity) |
| D2A | 2 | Decreased | |
| P4A | 3 | | Pseudo wt |
| Q5A | 4 | | Pseudo wt |
| T6A | 5 | | Pseudo wt |
| H7A | 6 | Decreased | |
| S8A | 7 | Decreased | |
| L9A | 8 | | Pseudo wt |
| G10A | 9 | | Pseudo wt |
| S11A | 10 | Decreased | |
| R12A | 11 | Decreased | |
| R13A | 12 | Decreased | |
| T14A | 13 | Decreased | |
| L15A | 14 | Decreased | |
| M16A | 15 | Decreased | |
| L17A | 16 | | Pseudo wt |
| Q20A | 17 | | Pseudo wt |
| R23A | 18 | Decreased | |
| I24A | 19 | | Pseudo wt |
| S25A | 20 | | Pseudo wt |
| L26A | 21 | Decreased | |
| S28A | 22 | Decreased | |
| C29A | 23 | Decreased | |
| L30A | 24 | Decreased | |
| K31A | 25 | Decreased | |
| D32A | 26 | Decreased | |
| R33A | 27 | Decreased | |
| D35A | 28 | | Pseudo wt |
| G37A | 29 | | Pseudo wt |
| G39A | 30 | | Pseudo wt |
| E41A | 31 | | Pseudo wt |
| E42 | 32 | | Pseudo wt |
| F43A | 33 | Decreased | |
| N45A | 34 | Decreased | |
| F47A | 35 | Decreased | |
| E51A | 36 | | Pseudo wt |
| T52A | 37 | | Pseudo wt |
| I53A | 38 | Decreased | |
| P54A | 39 | | Pseudo wt |
| V55A | 40 | | Pseudo wt |
| L56A | 41 | | Pseudo wt |
| H57A | 42 | | Pseudo wt |
| E58A | 43 | | Pseudo wt |
| M59A | 44 | Decreased | |
| I60A | 45 | | Pseudo wt |
| I63A | 46 | | Pseudo wt |
| F64A | 47 | | Pseudo wt |
| N65A | 48 | | Pseudo wt |
| L66A | 49 | Decreased | |
| F67A | 50 | Decreased | |
| T69A | 51 | Decreased | |
| K70A | 52 | Decreased | |
| D71A | 53 | Decreased | |
| S72A | 54 | Decreased | |
| W76A | 55 | | Pseudo wt |
| D77A | 56 | | Pseudo wt |
| E78A | 57 | | Pseudo wt |
| L81A | 58 | | Pseudo wt |
| D82A | 59 | Decreased | |
| K83A | 60 | Decreased | |
| F84A | 61 | Decreased | |
| Y85A | 62 | | Pseudo wt |
| Y89A | 63 | | Pseudo wt |
| Q90A | 64 | | Pseudo wt |
| Q91 | 65 | Decreased | |
| N93A | 66 | Decreased | |
| D94A | 67 | Decreased | |
| C98A | 68 | Decreased | |
| V99A | 69 | Decreased | |
| Q101A | 207 | Decreased | |
| G104A | 70 | | Pseudo wt |
| L110A | 71 | | Pseudo wt |
| S115A | 72 | | Pseudo wt |
| Y122A | 73 | Decreased | |
| W140A | 74 | Decreased | |
| E146A | 75 | | Pseudo wt |

### Example 5

[0684] Super LEADS of Interferon α-2b Protein by Additive Directional Mutagenesis

[0685] The use of an additive directional mutagenesis approach provided a method for the assembly of multiple mutations previously present on the individual LEAD molecules in a single mutant protein thereby generating super-LEAD mutant proteins. In this method, a collection of nucleic acid molecules encoding a library of new mutant molecules is generated, tested and phenotypically characterized one-by-one in addressable arrays. Super-LEAD mutant molecules are such that each molecule contains a variable number and type of LEAD mutations

[0686] Using the LEADs obtained in Example 2, six series of mutant molecules were generated with more than one mutation per molecule as shown in Table 6. Some SuperLEAD mutant molecules were phenotypically characterized and the results are shown in Table 7. As shown in the table not all SuperLEADS have improved activity compared with the original Leads; some showed decreased activity of some type.

TABLE 6
Schema of LEADs position for SuperLEADS generation

```
Series 1
    m1 = E41H
    m1 + m2 = E41H + Y89H
Series 2
    m1 = E58Q
    m1 + m2 = E58Q + F27V
Series 3
    m1 = R125H
    m1 + m2 = R125H + M111V
Series 4
    m1 = E159H
    m1 + m2 = E159H + Y89H
Series 5
    m1 = K121Q
    m1 + m2 = K121Q + P109A
    m1 + m2 + m3 = K121Q + P109A + K133Q
Series 6
    m1 = E78H
    m1 + m2 = E78H + R33H
    m1 + m2 + m3 = E78H + R33H + E58H
    m1 + m2 + m3 + m4 = E78H + R33H + E58H + L11OV
```

[0687] TABLE 7
SuperLEADs of IFNα-2b multiple mutants

| | SEQ ID | Proteolysis | IFN antiviral |
|---|---|---|---|
| Mutant | No. | protection | activity |
| E41H | 88 | Pseudo wt | Increased |
| Y89H | 1303 | Pseudo wt | Pseudo wt |
| E41H/Y89H/ | 979 | Increased | Increased |
| N45D** | | | |
| E58Q | 89 | Increased | Pseudo wt |
| F27V | 83 | Pseudo wt | Pseudo wt |
| E58Q/F27V | 981 | Increased | Pseudo wt |
| R125H | 106 | Increased | Increased |
| M111V | 978 | Pseudo wt | Pseudo wt |
| R125H/M111V | 986 | Increased | Increased |
| E159H | 125 | | |
| Y89H | 1303 | | |
| E159H/Y89H | 987 | | |
| K121Q | 104 | Increased | Pseudo wt |
| P109A | 97 | Pseudo wt | Pseudo wt |
| K133Q | 114 | Increased | Increased |
| K121Q/P109A | 983 | Increased | Pseudo wt |
| K121Q/P109A/ | 984 | Increased | Increased |
| K133Q/G102R | | | |
| E78H | 93 | Increased | Increased |
| R33H | 86 | Pseudo wt | Pseudo wt |
| E58H | 89 | Increased | Increased |
| L110V | 98 | Pseudo wt | Pseudo wt |
| E78H/R33H/ | 982 | Decreased | Decreased |
| E58H/L110V | | | |

[0688] Four mutants with mutations to additional those selected by the rational mutagenesis were generated in the E. coli MutS strain and were detected by sequencing. The mutants were the following: E41Q/ D94G SEQ.ID No. 199; L117V/ Al 39G SEQ.ID No. 204; E41 H/ Y89H/ N45D SEQ.ID No. 198; and K121Q/ P109A/ K133Q/ G102R SEQ.ID No. 204.

### Example 6

[0689] Cloning of IFN β in pNAUT, a Mammalian Cell Expression Plasmid

[0690] The cDNA encoding IFN β (see, SEQ ID No. 196) was cloned into a mammalian expression vector, prior to the generation of the selected mutations (see, FIGS. 6(O)-6(S) and 8(A). A collected of predesigned, targeted mutants was then generated such that each individual mutant was created and processed individually, physically separated form each other and in addressable arrays. The mammalian expression vector pSSV9 CMV 0.3 pA (see, Example 1) was engineered as follows:

[0691] The pSSV9 CMV 0.3 pA was cut by Pvull and religated (this step gets rid of the ITR functions), prior to the introduction of a new EcoRI restriction site by Quickchange mutagenesis (Stratagene). The oligonucleotides sequences used, follow:

| | |
|---|---|
| EcoRI forward primer: 5′-GGCTGTATGATTTATTGGATGTTGGAATTCCCTGAT- | (SEQ ID NO: 218) |
| GCGGTATTTTCTCCTTACG-3′ | |
| EcoRI reverse prime: 5′-CGTAAGGAGAAAATACCGCATCAGG- | (SEQ ID NO: 219) |
| GAATTCCAACATCCAATAAATCATACAGGC-3′ | |

[0692] The construct sequence was confirmed by using the following oligonucleotides:

| | |
|---|---|
| Seq Clal forward primer: 5′-CTGATTATCAACCGGGGTACATATGATTGACATGC-3′ | (SEQ ID NO: 220) |
| Seq Xmnl reverse primer 5′-TACGGGATAATACCGCGCCACATAGCAGAAC-3′. | (SEQ ID NO: 221) |

[0693] Then, the Xmnl-Clal fragment containing the newly introduced EcoRl site was cloned into pSSV9 CMV 0.3 pA to replace the corresponding wild-type fragment and produce construct pSSV9-2EcoRl.

[0694] The IFN β-cDNA was obtained from the pIFNβ1 (ATCC) construct. The sequence of the IFN β-cDNA was confirmed by sequencing using the primers below:

| | |
|---|---|
| Seq forward primer: 5′-CCTGATGAAGGAGGACTC-3′ | (SEQ ID NO:222) |
| Seq reverse primer: 5′-CCAAGCAGCAGATGAGTG-3′. | (SEQ ID NO:223) |

[0695] The verified IFN β-encoding cDNA first was cloned into the pTOPO-TA vector (Invitrogen). After checking of the cDNA sequence by automatic DNA sequencing, the HindIII-Xbal fragment containing the IFN cDNA was subcloned into the corresponding sites of pSSV9-2EcoRl, leading to the construct pAAV-EcoRI-IFNbeta (pNB-AAV-IFN beta) Finally the fragment Pvu II of plasmid pNB-AAV-IFN beta was subcloned in Pvull site of pUC 18 leading the final construct pUC-CMVIFNbetapA called pNAUT-IFNbeta.

[0696] Production and Normalization of IFNβ in Mammalian Cells

[0697] IFN β was produced in CHO Chinese Hamster Ovarian cells (obtained from ATCC), using Dubelcco's modified Eagle's medium supplemented with glucose (4.5 g/L; Gibco-BRL) and fetal bovine serum (5%, Hyclone). Cells were transiently transfected as follows: 0.6×10⁵ cells were seeded into 6 well plates and grown for 24 h before transfection. Confluent cells at about 70%, were supplemented with 1.0 μg of plasmid (from the library of IFN β mutants) by lipofectamine plus reagent (Invitrogen). After gently shaking, cells were incubated for 24 h with 1 ml of culture medium supplemented with 1% of serum. IFN β was obtained from culture supernatants 24 h after transfection and stored in aliquots at −80° C. until use.

[0698] Preparations of IFN β produced from transfected cells were screened following sequential biological assays as follows. Normalization of IFN β concentration from culture supernatants was performed by ELISA. IFN β concentrations from wild type, and mutants samples were estimated by using an international reference standard provided by the NIBSC, UK.

[0699] Screening and In Vitro Charaterization of IFN β Mutants

[0700] Two activities were measured directly on IFN samples: antiviral and antiproliferation activities. Dose (concentration)-response (activity) experiments for antiviral or antiproliferation activity allowed for the calculation of the ‘potency’ for antiviral and antiproliferation activities, respectively. Antiviral and antiproliferation activities also were measured after incubation with proteolytic samples such as specific proteases, mixtures of selected proteases, human serum or human blood. Assessment of activity following incubation with proteolytic samples allowed to determine the residual (antiviral or antiproliferation) activity an.d the respective kinetics of half-life upon exposure to proteases

[0701] Antiviral Activity—Measured by Cytopathic Effects (CPE)

[0702] Antiviral activity of IFN β was determined by the capacity of the cytokine to protect Hela cells against EMC (mouse encephalomyocarditis) virus-induced cytopathic effects. The day before, Hela cells (2×10⁵ cells/ml) were seeded in flat-bottomed 96-well plates containing 100 μl/well of Dulbecco's MEM-Glutamaxl-sodium pyruvate medium supplemented with 5% SVF and 0.2% of gentamicin. Cells were growth at 37° C. in an atmosphere of 5% CO₂ for 24 hours Two-fold serial dilutions of interferon samples were made with MEM complete media into 96-Deep-Well plates with final concentration ranging from 1600 to 0.6 pg/ml. The medium was aspirated from each well and 100 μl of interferon dilutions were added to Hela cells. Each interferon sample dilution was assessed in triplicate. The two last rows of the plates were filled with 100 μl of medium without interferon dilution samples in order to serve as controls for cells with and without virus.

[0703] After 24 hours of growth, a 1/1000 EMC virus dilution solution was placed in each well, except for the cell control row. Plates were returned to the CO₂ incubator for 48 hours. Then, the medium was aspirated and the cells were stained for 1 hour with 100 μl of Blue staining solutio to determine the proportion of intact cells. Plates were washed in a distilled water bath. The cell bound dye was extracted using 100 μl of ethylene-glycol mono-ethyl-ether (Sigma). The absorbance of the dye was measured using an Elisa plate reader (Spectramax). The antiviral activity of IFNβ samples (expressed as number of IU/mg of proteins) was determined as the concentration needed for 50% protection of the cells against EMC virus-induced cytopathic effects. For proteolysis experiments, each point of the kinetic was assessed at 800 and 400 pg/ml in triplicate.

[0704] Anti-Proliferative Activity

[0705] Anti-proliferative activity of IFN β was determined by assessing the capacity of the cytokine to inhibit proliferation of Daudi cells. Daudi cells (1×10⁴ cells) were seeded in flat-bottomed 96-well plates containing 50 μl/well of RPMI 1640 medium supplemented with 10% SVF, 1×glutamine and 1 ml of gentamicin. No cell was added to the last row (“H” row) of the flat-bottomed 96-well plates in order to evaluate background absorbance of culture medium.

[0706] At the same time, two-fold serial dilutions of interferon samples were made with RPMI 1640 complete media into 96-Deep-Well plates with final concentration ranging from 6000 to 2.9 pg/ml. Interferon dilutions (50 μl) were added to each well containing 50 μl of Daudi cells. The total volume in each well should now be 100 μl. Each interferon sample dilution was assessed in triplicate. Each well of the “G” row of the plates was filled with 50 μl of RPMI 1640 complete media in order to be used as positive control. The plates were incubated for 72 hours at 37° C. in a humidified, 5% CO2 atmosphere.

[0707] After 72 hours of growth, 20 μl of Cell titer 96 Aqueous one solution reagent (Promega) was added to each well and incubated 1H30 at 37° C. in an atmosphere of 5% CO₂. To measure the amount of colored soluble formazan produced by cellular reduction of the MTS, the absorbance of the dye was measured using an Elisa plate reader (spectramax) at 490 nm.

[0708] The corrected absorbances (“H” row background value subtracted) obtained at 490 nm were plotted versus concentration of cytokine. The ED50 value was calculated by determining the X-axis value corresponding to one-half the difference between the maximum and minimum absorbance values. (ED50=the concentration of cytokine necessary to give one-half the maximum response).

[0709] Treatment of IFN β with Proteolytic Preparations

[0710] Mutants were treated with proteases in order to identify resistant molecules. The resistance of the mutant IFN βmolecules compared to wild-type IFN β against enzymatic cleavage (120 min, 25° C.) by a mixture of proteases (containing 1.5 pg of each of the following proteases (1% wt/wt, Sigma): α-chymotrypsin, carboxypeptidase, endoproteinase Arg-C, endoproteinase Asp-N, endoproteinase Glu-C, endoproteinase Lys-C, and trypsin) was determined. At the end of the incubation time, 10 μl of anti-proteases complete, mini EDTA free, Roche (one tablet was dissolved in 10 ml of DMEM and then diluted to 1/1000) was added to each reaction in order to inhibit protease activity. Treated samples were then used to determine residual antiviral or antiproliferation activities.

[0711] Protease Resistance—Kinetic Analysis

[0712] The percent of residual IFN β activity over time of exposure to proteases was evaluated by a kinetic study using 1.5 μg of protease mixture. Incubation times were: 0 h, 0.5 h, 2 h, 4 h, 8 h, 12 h, 24 h and 48 h. Briefly, 20 μl of each proteolytic sample (proteases, serum, bnlood) was added to 100 μl of IFN β at 400 and 800 pg/ml and incubated for variable times, as indicated. At the appropriate time points, 10 μl of anti-proteases mixture, mini EDTA free, Roche (one tablet was dissolved in 10 ml of DMEM and then diluted to 1/500) was added to each well in order to stop proteolysis reactions. Biological activity assays were then performed as described for each sample in order to determine the residual activity at each time point.

[0713] Performance

[0714] The various biological activities, protease resistance and potency of each individual mutant were analyzed using a mathematical model and algorithm (NautScan™; Fr. Patent No. 9915884; see, also published International PCT application No. WO 01/44809 based on PCT n° PCT/FR00/03503). Data was processed using a Hill equation-based model that uses key feature indicators of the performance of each individual mutant. Mutants were ranked based on the values of their individual performance and those on the top of the ranking list were selected as leads.

[0715] Using the 2D-scanning and 3D-scanning methods described above in addition to the 3-dimensional structure of IFNβ, the following amino acid target positions were identified as is-HITs on IFNβ, which numbering is that of the mature protein (SEQ ID NO:196):

[0716] By 3D-scanning (see, SEQ ID Nos. 234-289, 989-1015): D by Q at position 39, D by H at position 39, D by G at position 39, E by Q at position 42, E by H at position 42, K by Q at position 45, K by T at position 45, K by S at position 45, K by H at position 45, L by V at position 47, L by I at position 47, L by T at position 47, L by Q at position 47, L by H at position 47, L by A at position 47, K by Q at position 52, K by T at position 52, K by S at position 52, K by H at position 52, F by I at position 67, F by V at position 67, R by H at position 71, R by Q at position 71, D by H at position 73, D by G at position 73, D by Q at position 73, E by Q at position 81, E by H at position 81, E by Q at position 107, E by H at position 107, K by Q at position 108, K by T at position 108, K by S at position 108, K by H at position 108, E by Q at position 109, E by H at position 109, D by Q at position 110, D by H at position 110, D by G at position 110, F by I at position 111, F by V at position 111, R by H at position 113, R by Q at position 113, L by V at position 116, L by I at position 116, L by T at position 116, L by Q at position 116, L by H at position 116, L by A at position 116, L by V at position 120, L by I at position 120, L by T at position 120, L by Q at position 120, L by H at position 120, L by A at position 120, K by Q at position 123, K by T at position 123, K by S at position 123, K by H at position 123, R by H at position 124, R by Q at position 124, R by H at position 128, R by Q at position 128, L by V at position 130, L by I at position 130, L by T at position 130, L by Q at position 130, L by H at position 130, L by A at position 130, K by Q at position 134, K by T at position 134, K by S at position 134, K by H at position 134, K by Q at position 136, K by T at position 136, K by S at position 136, K by H at position 136, E by Q at position 137, E by H at position 137, Y by H at position 163, Y by I at position 1631, R by H at position 165, R by Q at position 165.

[0717] By 2D-scanning (see, SEQ ID Nos.1016-1302, and table above): M by V at position 1, M by I at position 1, M by T at position 1, M by Q at position 1, M by A at position 1, L by V at position 5, L by I at position 5, L by T at position 5, L by Q at position 5, L by H at position 5, L by A at position 5, F by I at position 8, F by V at position 8, L by V at position 9, L by I at position 9, L by T at position 9, L by Q at position 9, L by H at position 9, L by A at position 9, R by H at position 11, R by Q at position 11, F by I at position 15, F by V at position 15, K by Q at position 19, K by T at position 19, K by S at position 19, K by H at position 19, W by S at position 22, W by H at position 22, N by H at position 25, N by S at position 25, N by Q at position 25, R by H position 27, R by Q position 27, L by V at position 28, L by I at position 28, L by T at position 28, L by Q at position 28, L by H at position 28, L by A at position 28, E by Q at position 29, E by H at position 29, Y by H at position 30, Y by I at position 30, L by V at position 32, L by I at position 32, L by T at position 32, L by Q at position 32, L by H at position 32, L by A at position 32, K by Q at position 33, K by T at position 33, K by S at position 33, K by H at position 33, R by H at position 35, R by Q at position 35, M by V at position 36, M by I at position 36, M by T at position 36, M by Q at position 36, M by A at position 36, D by Q at position 39, D by H at position 39, D by G at position 39, E by Q at position 42, E by H at position 42, K by Q at position 45, K by T at position 45, K by S at position 45, K by H at position 45, L by V at position 47, L by I at position 47, L by T at position 47, L by, Q at position 47, L by H at position 47, L by A at position 47, K by Q at position 52, K by T at position 52, K by S at position 52, K by H at position 52, F by I at position 67, F by V at position 67, R by H at position 71, R by Q at position 71, D by Q at position 73, D by H at position 73, D by G at position 73, E by Q at position 81, E by H at position 81, E by Q at position 85, E by H at position 85, Y by H at position 92, Y by I at position 92, K by Q at position 99, K by T at position 99, K by S at position 99, K by H at position 99, E by Q at position 103, E by H at position 103, E by Q at position 104, E by H at position 104, K by Q at position 105, K by T at position 105, K by S at position 105, K by H at position 105, E by Q at position 107, E by H at position 107, K by Q at position 108, K by T at position 108, K by S at position 108, K by H at position 108, E by Q at position 109, E by H at position 109, D by Q at position 110, D by H at position 110, D by G at position 110, F by I at position 111, F by V at position 111, R by H at position 113, R by Q at position 113, L by V at position 116, L by I at position 116, L by T at position 116, L by Q at position 116, L by H at position 116, L by A at position 116, L by V at position 120, L by I at position 120, L by T at position 120, L by Q at position 120, L by H at position 120, L by A at position 120, K by Q at position 123, K by T at position 123, K by S at position 123, K by H at position 123, R by H at position 124, R by Q at position 124, R by H at position 128, R by Q at position 128, L by V at position 130, L by I at position 130, L by T at position 130, L by Q at position 130, L by H at position 130, L by A at position 130, K by Q at position 134, K by T at position 134, K by S at position 134, K by H at position 134, K by Q at position 136, K by T at position 136, K by S at position 136, K by H at position 136, E by Q at position 137, E by H at position 137, Y by H at position 138, Y by I at position 138, R by H at position 152, R by Q at position 152, Y by H at position 155, Y by I at position 155, R by H at position 159, R by Q at position 159, Y by H at position 163, Y by I at position 163, R by H at position 165, R by Q at position 165, M by D at position 1, M by E at position 1, M by K at position 1, M by N at position 1, M by R at position 1, M by S at position 1, L by D at position 5, L by E at position 5, L by K at position 5, L by N at position 5, L by R at position 5, L by S at position 5, L by D at position 6, L by E at position 6, L by K at position 6, L by N at position 6, L by R at position 6, L by S at position 6, L by Q at position 6, L by T at position 6, F by E at position 8, F by K at position 8, F by R at position 8, F by D at position 8, L by D at position 9, L by E at position 9, L by K at position 9, L by N at position 9, L by R at position 9, L by S at position 9, Q by D at position 10, Q by E at position 10, Q by K at position 10, Q by N at position 10, Q by R at position 10, Q by S at position 10, Q by T at position 10, S by D at position 12, S by E at position 12, S by K at position 12, S by R at position 12, S by D at position 13, S by E at position 13, S by K at position 13, S by R at position 13, S by N at position 13, S by Q at position 13, S by T at position 13, N by D at position 14, N by E at position 14, N by K at position 14, N by Q at position 14, N by R at position 14, N by S at position 14, N by T at position 14, F by D at position 15, F by E at position 15, F by K at position 15, F by R at position 15, Q by D at position 16, Q by E at position 16, Q by K at position 16, Q by N at position 16, Q by R at position 16, Q by S at position 16, Q by T at position 16, C by D at position 17, C by E at position 17, C by K at position 17, C by N at position 17, C by Q at position 17, C by R at position 17, C by S at position 17, C by T at position 17, L by N at position 20, L by Q at position 20, L by R at position 20, L by S at position 20, L by T at position 20, L by D at position 20, L by E at position 20, L by K at position 20, W by D at position 22, W by E at position 22, W by K at position 22, W by R at position 22, Q by D at position 23, Q by E at position 23, Q by K at position 23, Q by R at position 23, L by D at position 24, L by E at position 24, L by K at position 24, L by R at position 24, W by D at position 79, W by E at position 79, W by K at position 79, W by R at position 79, N by D at position 80, N by E at position 80, N by K at position 80, N by R at position 80, T by D at position 82, T by E at position 82, T by K at position 82, T by R at position 82, I by D at position 83, I by E at position 83, I by K at position 83, I by R at position 83, I by N at position 83, I by Q at position 83, I by S at position 83, I by T at position 83, N by D at position 86, N by E at position 86, N by K at position 86, N by R at position 86, N by Q at position 86, N by S at position 86, N by T at position 86, L by D at position 87, L by E at position 87, L by K at position 87, L by R at position 87, L by N at position 87, L by Q at position 87, L by S at position 87, L by T at position 87, A by D at position 89, A by E at position 89, A by K at position 89, A by R at position 89, N by D at position 90, N by E at position 90, N by K at position 90, N by Q at position 90, N by R at position 90, N by S at position 90, N by T at position 90, V by D at position 91, V by E at position 91, V by K at position 91, V by N at position 91, V by Q at position 91, V by R at position 91, V by S at position 91, V by T at position 91, Q by D at position 94, Q by E at position 94, Q by Q at position 94, Q by N at position 94, Q by R at position 94, Q by S at position 94, Q by T at position 94, I by D at position 95, I by E at position 95, I by K at position 95, I by N at position 95, I by Q at position 95, I by R at position 95, I by S at position 95, I by T at position 95, H by D at position 97, H by E at position 97, H by K at position 97, H by N at position 97, H by Q at position 97, H by R at position 97, H by S at position 97, H by T at position 97, L by D at position 98, L by E at position 98, L by K at position 98, L by N at position 98, L by Q at position 98, L by R at position 98, L by S at position 98, L by T at position 98, V by D at position 101, V by E at position 101, V by K at position 101, V by N at position 101, V by Q at position 101, V by R at position 101, V by S at position 101, V by T at position 101, M by C at position 1, L by C at position 6, Q by C at position 10, S by C at position 13, Q by C at position 16, L by C at position 17, V by C at position 101, L by C at position 98, H by C at position 97, Q by C at position 94, V by C at position 91, N by C at position 90.

[0718] Since modifications will be apparent to those of skill in this art, it is intended that this invention be limited only by the scope of the appended claims.

The application's sequence listing, which the Patent Office published only in electronic form, follows.

SEQUENCE LISTING (1306 sequences)

SEQ ID NO: 1 - protein, 165 aa, Homo sapiens [sequence omitted]

SEQ ID NO: 2 - protein, 165 aa, Artificial Sequence
  D2A Mutant IFN-alpha 2b
CALPQTHSLGSRRTLMLLAQMRRISLFSCLKDRHDFGFPQEEFGNQFQKAETIPVLHEMIQQIFNLFSTKDSSAAWDETLLDKFYTELYQQLNDLEACVIQGVGVTETPLMKEDSILAVRKYFQRITLYLKEKKYSPCAWEVVRAEIMRSFSLSTNLQESLRSKE

SEQ ID NO: 3 - protein, 165 aa, Artificial Sequence
  P4A Mutant IFN-alpha 2b
CDLAQTHSLGSRRTLMLLAQMRRISLFSCLKDRHDFGFPQEEFGNQFQKAETIPVLHEMIQQIFNLFSTKDSSAAWDETLLDKFYTELYQQLNDLEACVIQGVGVTETPLMKEDSILAVRKYFQRITLYLKEKKYSPCAWEVVRAEIMRSFSLSTNLQESLRSKE

SEQ ID NO: 4 - protein, 165 aa, Artificial Sequence
  Q5A Mutant IFN-alpha 2b
CDLPATHSLGSRRTLMLLAQMRRISLFSCLKDRHDFGFPQEEFGNQFQKAETIPVLHEMIQQIFNLFSTKDSSAAWDETLLDKFYTELYQQLNDLEACVIQGVGVTETPLMKEDSILAVRKYFQRITLYLKEKKYSPCAWEVVRAEIMRSFSLSTNLQESLRSKE

SEQ ID NO: 5 - protein, 165 aa, Artificial Sequence
  T6A Mutant IFN-alpha 2b
CDLPQAHSLGSRRTLMLLAQMRRISLFSCLKDRHDFGFPQEEFGNQFQKAETIPVLHEMIQQIFNLFSTKDSSAAWDETLLDKFYTELYQQLNDLEACVIQGVGVTETPLMKEDSILAVRKYFQRITLYLKEKKYSPCAWEVVRAEIMRSFSLSTNLQESLRSKE

SEQ ID NO: 6 - protein, 165 aa, Artificial Sequence
  H7A Mutant IFN-alpha 2b
CDLPQTASLGSRRTLMLLAQMRRISLFSCLKDRHDFGFPQEEFGNQFQKAETIPVLHEMIQQIFNLFSTKDSSAAWDETLLDKFYTELYQQLNDLEACVIQGVGVTETPLMKEDSILAVRKYFQRITLYLKEKKYSPCAWEVVRAEIMRSFSLSTNLQESLRSKE

SEQ ID NO: 7 - protein, 165 aa, Artificial Sequence
  S8A Mutant IFN-alpha 2b
CDLPQTHALGSRRTLMLLAQMRRISLFSCLKDRHDFGFPQEEFGNQFQKAETIPVLHEMIQQIFNLFSTKDSSAAWDETLLDKFYTELYQQLNDLEACVIQGVGVTETPLMKEDSILAVRKYFQRITLYLKEKKYSPCAWEVVRAEIMRSFSLSTNLQESLRSKE

SEQ ID NO: 8 - protein, 165 aa, Artificial Sequence
  L9A Mutant IFN-alpha 2b
CDLPQTHSAGSRRTLMLLAQMRRISLFSCLKDRHDFGFPQEEFGNQFQKAETIPVLHEMIQQIFNLFSTKDSSAAWDETLLDKFYTELYQQLNDLEACVIQGVGVTETPLMKEDSILAVRKYFQRITLYLKEKKYSPCAWEVVRAEIMRSFSLSTNLQESLRSKE

SEQ ID NO: 9 - protein, 165 aa, Artificial Sequence
  G10A Mutant IFN-alpha 2b
CDLPQTHSLASRRTLMLLAQMRRISLFSCLKDRHDFGFPQEEFGNQFQKAETIPVLHEMIQQIFNLFSTKDSSAAWDETLLDKFYTELYQQLNDLEACVIQGVGVTETPLMKEDSILAVRKYFQRITLYLKEKKYSPCAWEVVRAEIMRSFSLSTNLQESLRSKE

SEQ ID NO: 10 - protein, 165 aa, Artificial Sequence
  S11A Mutant IFN-alpha 2b
CDLPQTHSLGARRTLMLLAQMRRISLFSCLKDRHDFGFPQEEFGNQFQKAETIPVLHEMIQQIFNLFSTKDSSAAWDETLLDKFYTELYQQLNDLEACVIQGVGVTETPLMKEDSILAVRKYFQRITLYLKEKKYSPCAWEVVRAEIMRSFSLSTNLQESLRSKE

SEQ ID NO: 11 - protein, 165 aa, Artificial Sequence
  R12A Mutant IFN-alpha 2b
CDLPQTHSLGSARTLMLLAQMRRISLFSCLKDRHDFGFPQEEFGNQFQKAETIPVLHEMIQQIFNLFSTKDSSAAWDETLLDKFYTELYQQLNDLEACVIQGVGVTETPLMKEDSILAVRKYFQRITLYLKEKKYSPCAWEVVRAEIMRSFSLSTNLQESLRSKE

SEQ ID NO: 12 - protein, 165 aa, Artificial Sequence
  R13A Mutant IFN-alpha 2b
CDLPQTHSLGSRATLMLLAQMRRISLFSCLKDRHDFGFPQEEFGNQFQKAETIPVLHEMIQQIFNLFSTKDSSAAWDETLLDKFYTELYQQLNDLEACVIQGVGVTETPLMKEDSILAVRKYFQRITLYLKEKKYSPCAWEVVRAEIMRSFSLSTNLQESLRSKE

SEQ ID NO: 13 - protein, 165 aa, Artificial Sequence
  T14A Mutant IFN-alpha 2b
CDLPQTHSLGSRRALMLLAQMRRISLFSCLKDRHDFGFPQEEFGNQFQKAETIPVLHEMIQQIFNLFSTKDSSAAWDETLLDKFYTELYQQLNDLEACVIQGVGVTETPLMKEDSILAVRKYFQRITLYLKEKKYSPCAWEVVRAEIMRSFSLSTNLQESLRSKE

SEQ ID NO: 14 - protein, 165 aa, Artificial Sequence
  L15A Mutant IFN-alpha 2b
CDLPQTHSLGSRRTAMLLAQMRRISLFSCLKDRHDFGFPQEEFGNQFQKAETIPVLHEMIQQIFNLFSTKDSSAAWDETLLDKFYTELYQQLNDLEACVIQGVGVTETPLMKEDSILAVRKYFQRITLYLKEKKYSPCAWEVVRAEIMRSFSLSTNLQESLRSKE

SEQ ID NO: 15 - protein, 165 aa, Artificial Sequence
  M16A Mutant IFN-alpha 2b
CDLPQTHSLGSRRTLALLAQMRRISLFSCLKDRHDFGFPQEEFGNQFQKAETIPVLHEMIQQIFNLFSTKDSSAAWDETLLDKFYTELYQQLNDLEACVIQGVGVTETPLMKEDSILAVRKYFQRITLYLKEKKYSPCAWEVVRAEIMRSFSLSTNLQESLRSKE

SEQ ID NO: 16 - protein, 165 aa, Artificial Sequence
  L17A Mutant IFN-alpha 2b
CDLPQTHSLGSRRTLMALAQMRRISLFSCLKDRHDFGFPQEEFGNQFQKAETIPVLHEMIQQIFNLFSTKDSSAAWDETLLDKFYTELYQQLNDLEACVIQGVGVTETPLMKEDSILAVRKYFQRITLYLKEKKYSPCAWEVVRAEIMRSFSLSTNLQESLRSKE

SEQ ID NO: 17 - protein, 165 aa, Artificial Sequence
  Q20A Mutant IFN-alpha 2b
CDLPQTHSLGSRRTLMLLAAMRRISLFSCLKDRHDFGFPQEEFGNQFQKAETIPVLHEMIQQIFNLFSTKDSSAAWDETLLDKFYTELYQQLNDLEACVIQGVGVTETPLMKEDSILAVRKYFQRITLYLKEKKYSPCAWEVVRAEIMRSFSLSTNLQESLRSKE

SEQ ID NO: 18 - protein, 165 aa, Artificial Sequence
  R23A Mutant IFN-alpha 2b
CDLPQTHSLGSRRTLMLLAQMRAISLFSCLKDRHDFGFPQEEFGNQFQKAETIPVLHEMIQQIFNLFSTKDSSAAWDETLLDKFYTELYQQLNDLEACVIQGVGVTETPLMKEDSILAVRKYFQRITLYLKEKKYSPCAWEVVRAEIMRSFSLSTNLQESLRSKE

SEQ ID NO: 19 - protein, 165 aa, Artificial Sequence
  I24A Mutant IFN-alpha 2b
CDLPQTHSLGSRRTLMLLAQMRRASLFSCLKDRHDFGFPQEEFGNQFQKAETIPVLHEMIQQIFNLFSTKDSSAAWDETLLDKFYTELYQQLNDLEACVIQGVGVTETPLMKEDSILAVRKYFQRITLYLKEKKYSPCAWEVVRAEIMRSFSLSTNLQESLRSKE

SEQ ID NO: 20 - protein, 165 aa, Artificial Sequence
  S25A Mutant IFN-alpha 2b
CDLPQTHSLGSRRTLMLLAQMRRIALFSCLKDRHDFGFPQEEFGNQFQKAETIPVLHEMIQQIFNLFSTKDSSAAWDETLLDKFYTELYQQLNDLEACVIQGVGVTETPLMKEDSILAVRKYFQRITLYLKEKKYSPCAWEVVRAEIMRSFSLSTNLQESLRSKE

SEQ ID NO: 21 - protein, 165 aa, Artificial Sequence
  L26A Mutant IFN-alpha 2b
CDLPQTHSLGSRRTLMLLAQMRRISAFSCLKDRHDFGFPQEEFGNQFQKAETIPVLHEMIQQIFNLFSTKDSSAAWDETLLDKFYTELYQQLNDLEACVIQGVGVTETPLMKEDSILAVRKYFQRITLYLKEKKYSPCAWEVVRAEIMRSFSLSTNLQESLRSKE

SEQ ID NO: 22 - protein, 165 aa, Artificial Sequence
  S28A Mutant IFN-alpha 2b
CDLPQTHSLGSRRTLMLLAQMRRISLFACLKDRHDFGFPQEEFGNQFQKAETIPVLHEMIQQIFNLFSTKDSSAAWDETLLDKFYTELYQQLNDLEACVIQGVGVTETPLMKEDSILAVRKYFQRITLYLKEKKYSPCAWEVVRAEIMRSFSLSTNLQESLRSKE

SEQ ID NO: 23 - protein, 165 aa, Artificial Sequence
  C29A Mutant IFN-alpha 2b
CDLPQTHSLGSRRTLMLLAQMRRISLFSALKDRHDFGFPQEEFGNQFQKAETIPVLHEMIQQIFNLFSTKDSSAAWDETLLDKFYTELYQQLNDLEACVIQGVGVTETPLMKEDSILAVRKYFQRITLYLKEKKYSPCAWEVVRAEIMRSFSLSTNLQESLRSKE

SEQ ID NO: 24 - protein, 165 aa, Artificial Sequence
  L30A Mutant IFN-alpha 2b
CDLPQTHSLGSRRTLMLLAQMRRISLFSCAKDRHDFGFPQEEFGNQFQKAETIPVLHEMIQQIFNLFSTKDSSAAWDETLLDKFYTELYQQLNDLEACVIQGVGVTETPLMKEDSILAVRKYFQRITLYLKEKKYSPCAWEVVRAEIMRSFSLSTNLQESLRSKE

SEQ ID NO: 25 - protein, 165 aa, Artificial Sequence
  K31A Mutant IFN-alpha 2b
CDLPQTHSLGSRRTLMLLAQMRRISLFSCLADRHDFGFPQEEFGNQFQKAETIPVLHEMIQQIFNLFSTKDSSAAWDETLLDKFYTELYQQLNDLEACVIQGVGVTETPLMKEDSILAVRKYFQRITLYLKEKKYSPCAWEVVRAEIMRSFSLSTNLQESLRSKE

SEQ ID NO: 26 - protein, 165 aa, Artificial Sequence
  D32A Mutant IFN-alpha 2b
CDLPQTHSLGSRRTLMLLAQMRRISLFSCLKARHDFGFPQEEFGNQFQKAETIPVLHEMIQQIFNLFSTKDSSAAWDETLLDKFYTELYQQLNDLEACVIQGVGVTETPLMKEDSILAVRKYFQRITLYLKEKKYSPCAWEVVRAEIMRSFSLSTNLQESLRSKE

SEQ ID NO: 27 - protein, 165 aa, Artificial Sequence
  R33A Mutant IFN-alpha 2b
CDLPQTHSLGSRRTLMLLAQMRRISLFSCLKDAHDFGFPQEEFGNQFQKAETIPVLHEMIQQIFNLFSTKDSSAAWDETLLDKFYTELYQQLNDLEACVIQGVGVTETPLMKEDSILAVRKYFQRITLYLKEKKYSPCAWEVVRAEIMRSFSLSTNLQESLRSKE

SEQ ID NO: 28 - protein, 165 aa, Artificial Sequence
  D35A Mutant IFN-alpha 2b
CDLPQTHSLGSRRTLMLLAQMRRISLFSCLKDRHAFGFPQEEFGNQFQKAETIPVLHEMIQQIFNLFSTKDSSAAWDETLLDKFYTELYQQLNDLEACVIQGVGVTETPLMKEDSILAVRKYFQRITLYLKEKKYSPCAWEVVRAEIMRSFSLSTNLQESLRSKE

SEQ ID NO: 29 - protein, 165 aa, Artificial Sequence
  G37A Mutant IFN-alpha 2b
CDLPQTHSLGSRRTLMLLAQMRRISLFSCLKDRHDFAFPQEEFGNQFQKAETIPVLHEMIQQIFNLFSTKDSSAAWDETLLDKFYTELYQQLNDLEACVIQGVGVTETPLMKEDSILAVRKYFQRITLYLKEKKYSPCAWEVVRAEIMRSFSLSTNLQESLRSKE

SEQ ID NO: 30 - protein, 165 aa, Artificial Sequence
  P39A Mutant IFN-alpha 2b
CDLPQTHSLGSRRTLMLLAQMRRISLFSCLKDRHDFGFAQEEFGNQFQKAETIPVLHEMIQQIFNLFSTKDSSAAWDETLLDKFYTELYQQLNDLEACVIQGVGVTETPLMKEDSILAVRKYFQRITLYLKEKKYSPCAWEVVRAEIMRSFSLSTNLQESLRSKE

SEQ ID NO: 31 - protein, 165 aa, Artificial Sequence
  E41A Mutant IFN-alpha 2b
CDLPQTHSLGSRRTLMLLAQMRRISLFSCLKDRHDFGFPQAEFGNQFQKAETIPVLHEMIQQIFNLFSTKDSSAAWDETLLDKFYTELYQQLNDLEACVIQGVGVTETPLMKEDSILAVRKYFQRITLYLKEKKYSPCAWEVVRAEIMRSFSLSTNLQESLRSKE

SEQ ID NO: 32 - protein, 165 aa, Artificial Sequence
  E42A Mutant IFN-alpha 2b
CDLPQTHSLGSRRTLMLLAQMRRISLFSCLKDRHDFGFPQEAFGNQFQKAETIPVLHEMIQQIFNLFSTKDSSAAWDETLLDKFYTELYQQLNDLEACVIQGVGVTETPLMKEDSILAVRKYFQRITLYLKEKKYSPCAWEVVRAEIMRSFSLSTNLQESLRSKE

SEQ ID NO: 33 - protein, 165 aa, Artificial Sequence
  F43A Mutant IFN-alpha 2b
CDLPQTHSLGSRRTLMLLAQMRRISLFSCLKDRHDFGFPQEEAGNQFQKAETIPVLHEMIQQIFNLFSTKDSSAAWDETLLDKFYTELYQQLNDLEACVIQGVGVTETPLMKEDSILAVRKYFQRITLYLKEKKYSPCAWEVVRAEIMRSFSLSTNLQESLRSKE

SEQ ID NO: 34 - protein, 165 aa, Artificial Sequence
  N45A Mutant IFN-alpha 2b
CDLPQTHSLGSRRTLMLLAQMRRISLFSCLKDRHDFGFPQEEFGAQFQKAETIPVLHEMIQQIFNLFSTKDSSAAWDETLLDKFYTELYQQLNDLEACVIQGVGVTETPLMKEDSILAVRKYFQRITLYLKEKKYSPCAWEVVRAEIMRSFSLSTNLQESLRSKE

SEQ ID NO: 35 - protein, 165 aa, Artificial Sequence
  F47A Mutant IFN-alpha 2b
CDLPQTHSLGSRRTLMLLAQMRRISLFSCLKDRHDFGFPQEEFGNQAQKAETIPVLHEMIQQIFNLFSTKDSSAAWDETLLDKFYTELYQQLNDLEACVIQGVGVTETPLMKEDSILAVRKYFQRITLYLKEKKYSPCAWEVVRAEIMRSFSLSTNLQESLRSKE

SEQ ID NO: 36 - protein, 165 aa, Artificial Sequence
  E51A Mutant IFN-alpha 2b
CDLPQTHSLGSRRTLMLLAQMRRISLFSCLKDRHDFGFPQEEFGNQFQKAATIPVLHEMIQQIFNLFSTKDSSAAWDETLLDKFYTELYQQLNDLEACVIQGVGVTETPLMKEDSILAVRKYFQRITLYLKEKKYSPCAWEVVRAEIMRSFSLSTNLQESLRSKE

SEQ ID NO: 37 - protein, 165 aa, Artificial Sequence
  T52A Mutant IFN-alpha 2b
CDLPQTHSLGSRRTLMLLAQMRRISLFSCLKDRHDFGFPQEEFGNQFQKAEAIPVLHEMIQQIFNLFSTKDSSAAWDETLLDKFYTELYQQLNDLEACVIQGVGVTETPLMKEDSILAVRKYFQRITLYLKEKKYSPCAWEVVRAEIMRSFSLSTNLQESLRSKE

SEQ ID NO: 38 - protein, 165 aa, Artificial Sequence
  I53A Mutant IFN-alpha 2b
CDLPQTHSLGSRRTLMLLAQMRRISLFSCLKDRHDFGFPQEEFGNQFQKAETAPVLHEMIQQIFNLFSTKDSSAAWDETLLDKFYTELYQQLNDLEACVIQGVGVTETPLMKEDSILAVRKYFQRITLYLKEKKYSPCAWEVVRAEIMRSFSLSTNLQESLRSKE

SEQ ID NO: 39 - protein, 165 aa, Artificial Sequence
  P54A Mutant IFN-alpha 2b
CDLPQTHSLGSRRTLMLLAQMRRISLFSCLKDRHDFGFPQEEFGNQFQKAETIAVLHEMIQQIFNLFSTKDSSAAWDETLLDKFYTELYQQLNDLEACVIQGVGVTETPLMKEDSILAVRKYFQRITLYLKEKKYSPCAWEVVRAEIMRSFSLSTNLQESLRSKE

SEQ ID NO: 40 - protein, 165 aa, Artificial Sequence
  V55A Mutant IFN-alpha 2b
CDLPQTHSLGSRRTLMLLAQMRRISLFSCLKDRHDFGFPQEEFGNQFQKAETIPALHEMIQQIFNLFSTKDSSAAWDETLLDKFYTELYQQLNDLEACVIQGVGVTETPLMKEDSILAVRKYFQRITLYLKEKKYSPCAWEVVRAEIMRSFSLSTNLQESLRSKE

SEQ ID NO: 41 - protein, 165 aa, Artificial Sequence
  L56A Mutant IFN-alpha 2b
CDLPQTHSLGSRRTLMLLAQMRRISLFSCLKDRHDFGFPQEEFGNQFQKAETIPVAHEMIQQIFNLFSTKDSSAAWDETLLDKFYTELYQQLNDLEACVIQGVGVTETPLMKEDSILAVRKYFQRITLYLKEKKYSPCAWEVVRAEIMRSFSLSTNLQESLRSKE

SEQ ID NO: 42 - protein, 165 aa, Artificial Sequence
  H57A Mutant IFN-alpha 2b
CDLPQTHSLGSRRTLMLLAQMRRISLFSCLKDRHDFGFPQEEFGNQFQKAETIPVLAEMIQQIFNLFSTKDSSAAWDETLLDKFYTELYQQLNDLEACVIQGVGVTETPLMKEDSILAVRKYFQRITLYLKEKKYSPCAWEVVRAEIMRSFSLSTNLQESLRSKE

SEQ ID NO: 43 - protein, 165 aa, Artificial Sequence
  E58A Mutant IFN-alpha 2b
CDLPQTHSLGSRRTLMLLAQMRRISLFSCLKDRHDFGFPQEEFGNQFQKAETIPVLHAMIQQIFNLFSTKDSSAAWDETLLDKFYTELYQQLNDLEACVIQGVGVTETPLMKEDSILAVRKYFQRITLYLKEKKYSPCAWEVVRAEIMRSFSLSTNLQESLRSKE

SEQ ID NO: 44 - protein, 165 aa, Artificial Sequence
  M59A Mutant IFN-alpha 2b
CDLPQTHSLGSRRTLMLLAQMRRISLFSCLKDRHDFGFPQEEFGNQFQKAETIPVLHEAIQQIFNLFSTKDSSAAWDETLLDKFYTELYQQLNDLEACVIQGVGVTETPLMKEDSILAVRKYFQRITLYLKEKKYSPCAWEVVRAEIMRSFSLSTNLQESLRSKE

SEQ ID NO: 45 - protein, 165 aa, Artificial Sequence
  I60A Mutant IFN-alpha 2b
CDLPQTHSLGSRRTLMLLAQMRRISLFSCLKDRHDFGFPQEEFGNQFQKAETIPVLHEMAQQIFNLFSTKDSSAAWDETLLDKFYTELYQQLNDLEACVIQGVGVTETPLMKEDSILAVRKYFQRITLYLKEKKYSPCAWEVVRAEIMRSFSLSTNLQESLRSKE

SEQ ID NO: 46 - protein, 165 aa, Artificial Sequence
  I63A Mutant IFN-alpha 2b
CDLPQTHSLGSRRTLMLLAQMRRISLFSCLKDRHDFGFPQEEFGNQFQKAETIPVLHEMIQQAFNLFSTKDSSAAWDETLLDKFYTELYQQLNDLEACVIQGVGVTETPLMKEDSILAVRKYFQRITLYLKEKKYSPCAWEVVRAEIMRSFSLSTNLQESLRSKE

SEQ ID NO: 47 - protein, 165 aa, Artificial Sequence
  F64A Mutant IFN-alpha 2b
CDLPQTHSLGSRRTLMLLAQMRRISLFSCLKDRHDFGFPQEEFGNQFQKAETIPVLHEMIQQIANLFSTKDSSAAWDETLLDKFYTELYQQLNDLEACVIQGVGVTETPLMKEDSILAVRKYFQRITLYLKEKKYSPCAWEVVRAEIMRSFSLSTNLQESLRSKE

SEQ ID NO: 48 - protein, 165 aa, Artificial Sequence
  N65A Mutant IFN-alpha 2b
CDLPQTHSLGSRRTLMLLAQMRRISLFSCLKDRHDFGFPQEEFGNQFQKAETIPVLHEMIQQIFALFSTKDSSAAWDETLLDKFYTELYQQLNDLEACVIQGVGVTETPLMKEDSILAVRKYFQRITLYLKEKKYSPCAWEVVRAEIMRSFSLSTNLQESLRSKE

SEQ ID NO: 49 - protein, 165 aa, Artificial Sequence
  L66A Mutant IFN-alpha 2b
CDLPQTHSLGSRRTLMLLAQMRRISLFSCLKDRHDFGFPQEEFGNQFQKAETIPVLHEMIQQIFNAFSTKDSSAAWDETLLDKFYTELYQQLNDLEACVIQGVGVTETPLMKEDSILAVRKYFQRITLYLKEKKYSPCAWEVVRAEIMRSFSLSTNLQESLRSKE

SEQ ID NO: 50 - protein, 165 aa, Artificial Sequence
  F67A Mutant IFN-alpha 2b
CDLPQTHSLGSRRTLMLLAQMRRISLFSCLKDRHDFGFPQEEFGNQFQKAETIPVLHEMIQQIFNLASTKDSSAAWDETLLDKFYTELYQQLNDLEACVIQGVGVTETPLMKEDSILAVRKYFQRITLYLKEKKYSPCAWEVVRAEIMRSFSLSTNLQESLRSKE

SEQ ID NO: 51 - protein, 165 aa, Artificial Sequence
  T69A Mutant IFN-alpha 2b
CDLPQTHSLGSRRTLMLLAQMRRISLFSCLKDRHDFGFPQEEFGNQFQKAETIPVLHEMIQQIFNLFSAKDSSAAWDETLLDKFYTELYQQLNDLEACVIQGVGVTETPLMKEDSILAVRKYFQRITLYLKEKKYSPCAWEVVRAEIMRSFSLSTNLQESLRSKE

SEQ ID NO: 52 - protein, 165 aa, Artificial Sequence
  K70A Mutant IFN-alpha 2b
CDLPQTHSLGSRRTLMLLAQMRRISLFSCLKDRHDFGFPQEEFGNQFQKAETIPVLHEMIQQIFNLFSTADSSAAWDETLLDKFYTELYQQLNDLEACVIQGVGVTETPLMKEDSILAVRKYFQRITLYLKEKKYSPCAWEVVRAEIMRSFSLSTNLQESLRSKE

SEQ ID NO: 53 - protein, 165 aa, Artificial Sequence
  D71A Mutant IFN-alpha 2b
CDLPQTHSLGSRRTLMLLAQMRRISLFSCLKDRHDFGFPQEEFGNQFQKAETIPVLHEMIQQIFNLFSTKASSAAWDETLLDKFYTELYQQLNDLEACVIQGVGVTETPLMKEDSILAVRKYFQRITLYLKEKKYSPCAWEVVRAEIMRSFSLSTNLQESLRSKE

SEQ ID NO: 54 - protein, 165 aa, Artificial Sequence
  S72A Mutant IFN-alpha 2b
CDLPQTHSLGSRRTLMLLAQMRRISLFSCLKDRHDFGFPQEEFGNQFQKAETIPVLHEMIQQIFNLFSTKDASAAWDETLLDKFYTELYQQLNDLEACVIQGVGVTETPLMKEDSILAVRKYFQRITLYLKEKKYSPCAWEVVRAEIMRSFSLSTNLQESLRSKE

SEQ ID NO: 55 - protein, 165 aa, Artificial Sequence
  W76A Mutant IFN-alpha 2b
CDLPQTHSLGSRRTLMLLAQMRRISLFSCLKDRHDFGFPQEEFGNQFQKAETIPVLHEMIQQIFNLFSTKDSSAAADETLLDKFYTELYQQLNDLEACVIQGVGVTETPLMKEDSILAVRKYFQRITLYLKEKKYSPCAWEVVRAEIMRSFSLSTNLQESLRSKE

SEQ ID NO: 56 - protein, 165 aa, Artificial Sequence
  D77A Mutant IFN-alpha 2b
CDLPQTHSLGSRRTLMLLAQMRRISLFSCLKDRHDFGFPQEEFGNQFQKAETIPVLHEMIQQIFNLFSTKDSSAAWAETLLDKFYTELYQQLNDLEACVIQGVGVTETPLMKEDSILAVRKYFQRITLYLKEKKYSPCAWEVVRAEIMRSFSLSTNLQESLRSKE

SEQ ID NO: 57 - protein, 165 aa, Artificial Sequence
  E78A Mutant IFN-alpha 2b
CDLPQTHSLGSRRTLMLLAQMRRISLFSCLKDRHDFGFPQEEFGNQFQKAETIPVLHEMIQQIFNLFSTKDSSAAWDATLLDKFYTELYQQLNDLEACVIQGVGVTETPLMKEDSILAVRKYFQRITLYLKEKKYSPCAWEVVRAEIMRSFSLSTNLQESLRSKE

SEQ ID NO: 58 - protein, 165 aa, Artificial Sequence
  L81A Mutant IFN-alpha 2b
CDLPQTHSLGSRRTLMLLAQMRRISLFSCLKDRHDFGFPQEEFGNQFQKAETIPVLHEMIQQIFNLFSTKDSSAAWDETLADKFYTELYQQLNDLEACVIQGVGVTETPLMKEDSILAVRKYFQRITLYLKEKKYSPCAWEVVRAEIMRSFSLSTNLQESLRSKE

SEQ ID NO: 59 - protein, 165 aa, Artificial Sequence
  D82A Mutant IFN-alpha 2b
CDLPQTHSLGSRRTLMLLAQMRRISLFSCLKDRHDFGFPQEEFGNQFQKAETIPVLHEMIQQIFNLFSTKDSSAAWDETLLAKFYTELYQQLNDLEACVIQGVGVTETPLMKEDSILAVRKYFQRITLYLKEKKYSPCAWEVVRAEIMRSFSLSTNLQESLRSKE

SEQ ID NO: 60 - protein, 165 aa, Artificial Sequence
  K83A Mutant IFN-alpha 2b
CDLPQTHSLGSRRTLMLLAQMRRISLFSCLKDRHDFGFPQEEFGNQFQKAETIPVLHEMIQQIFNLFSTKDSSAAWDETLLDAFYTELYQQLNDLEACVIQGVGVTETPLMKEDSILAVRKYFQRITLYLKEKKYSPCAWEVVRAEIMRSFSLSTNLQESLRSKE

SEQ ID NO: 61 - protein, 165 aa, Artificial Sequence
  F84A Mutant IFN-alpha 2b
CDLPQTHSLGSRRTLMLLAQMRRISLFSCLKDRHDFGFPQEEFGNQFQKAETIPVLHEMIQQIFNLFSTKDSSAAWDETLLDKAYTELYQQLNDLEACVIQGVGVTETPLMKEDSILAVRKYFQRITLYLKEKKYSPCAWEVVRAEIMRSFSLSTNLQESLRSKE

SEQ ID NO: 62 - protein, 165 aa, Artificial Sequence
  Y85A Mutant IFN-alpha 2b
CDLPQTHSLGSRRTLMLLAQMRRISLFSCLKDRHDFGFPQEEFGNQFQKAETIPVLHEMIQQIFNLFSTKDSSAAWDETLLDKFATELYQQLNDLEACVIQGVGVTETPLMKEDSILAVRKYFQRITLYLKEKKYSPCAWEVVRAEIMRSFSLSTNLQESLRSKE

SEQ ID NO: 63 - protein, 165 aa, Artificial Sequence
  Y89A Mutant IFN-alpha 2b
CDLPQTHSLGSRRTLMLLAQMRRISLFSCLKDRHDFGFPQEEFGNQFQKAETIPVLHEMIQQIFNLFSTKDSSAAWDETLLDKFYTELAQQLNDLEACVIQGVGVTETPLMKEDSILAVRKYFQRITLYLKEKKYSPCAWEVVRAEIMRSFSLSTNLQESLRSKE

SEQ ID NO: 64 - protein, 165 aa, Artificial Sequence
  Q90A Mutant IFN-alpha 2b
CDLPQTHSLGSRRTLMLLAQMRRISLFSCLKDRHDFGFPQEEFGNQFQKAETIPVLHEMIQQIFNLFSTKDSSAAWDETLLDKFYTELYAQLNDLEACVIQGVGVTETPLMKEDSILAVRKYFQRITLYLKEKKYSPCAWEVVRAEIMRSFSLSTNLQESLRSKE

SEQ ID NO: 65 - protein, 165 aa, Artificial Sequence
  Q91A Mutant IFN-alpha 2b
CDLPQTHSLGSRRTLMLLAQMRRISLFSCLKDRHDFGFPQEEFGNQFQKAETIPVLHEMIQQIFNLFSTKDSSAAWDETLLDKFYTELYQALNDLEACVIQGVGVTETPLMKEDSILAVRKYFQRITLYLKEKKYSPCAWEVVRAEIMRSFSLSTNLQESLRSKE

SEQ ID NO: 66 - protein, 165 aa, Artificial Sequence
  N93A Mutant IFN-alpha 2b
CDLPQTHSLGSRRTLMLLAQMRRISLFSCLKDRHDFGFPQEEFGNQFQKAETIPVLHEMIQQIFNLFSTKDSSAAWDETLLDKFYTELYQQLADLEACVIQGVGVTETPLMKEDSILAVRKYFQRITLYLKEKKYSPCAWEVVRAEIMRSFSLSTNLQESLRSKE

SEQ ID NO: 67 - protein, 165 aa, Artificial Sequence
  D94A Mutant IFN-alpha 2b
CDLPQTHSLGSRRTLMLLAQMRRISLFSCLKDRHDFGFPQEEFGNQFQKAETIPVLHEMIQQIFNLFSTKDSSAAWDETLLDKFYTELYQQLNALEACVIQGVGVTETPLMKEDSILAVRKYFQRITLYLKEKKYSPCAWEVVRAEIMRSFSLSTNLQESLRSKE

SEQ ID NO: 68 - protein, 165 aa, Artificial Sequence
  C98A Mutant IFN-alpha 2b
CDLPQTHSLGSRRTLMLLAQMRRISLFSCLKDRHDFGFPQEEFGNQFQKAETIPVLHEMIQQIFNLFSTKDSSAAWDETLLDKFYTELYQQLNDLEAAVIQGVGVTETPLMKEDSILAVRKYFQRITLYLKEKKYSPCAWEVVRAEIMRSFSLSTNLQESLRSKE

SEQ ID NO: 69 - protein, 165 aa, Artificial Sequence
  V99A Mutant IFN-alpha 2b
CDLPQTHSLGSRRTLMLLAQMRRISLFSCLKDRHDFGFPQEEFGNQFQKAETIPVLHEMIQQIFNLFSTKDSSAAWDETLLDKFYTELYQQLNDLEACAIQGVGVTETPLMKEDSILAVRKYFQRITLYLKEKKYSPCAWEVVRAEIMRSFSLSTNLQESLRSKE

SEQ ID NO: 70 - protein, 165 aa, Artificial Sequence
  G104A Mutant IFN-alpha 2b
CDLPQTHSLGSRRTLMLLAQMRRISLFSCLKDRHDFGFPQEEFGNQFQKAETIPVLHEMIQQIFNLFSTKDSSAAWDETLLDKFYTELYQQLNDLEACVIQGVAVTETPLMKEDSILAVRKYFQRITLYLKEKKYSPCAWEVVRAEIMRSFSLSTNLQESLRSKE

SEQ ID NO: 71 - protein, 165 aa, Artificial Sequence
  L110A Mutant IFN-alpha 2b
CDLPQTHSLGSRRTLMLLAQMRRISLFSCLKDRHDFGFPQEEFGNQFQKAETIPVLHEMIQQIFNLFSTKDSSAAWDETLLDKFYTELYQQLNDLEACVIQGVGVTETPAMKEDSILAVRKYFQRITLYLKEKKYSPCAWEVVRAEIMRSFSLSTNLQESLRSKE

SEQ ID NO: 72 - protein, 165 aa, Artificial Sequence
  S115A Mutant IFN-alpha 2b
CDLPQTHSLGSRRTLMLLAQMRRISLFSCLKDRHDFGFPQEEFGNQFQKAETIPVLHEMIQQIFNLFSTKDSSAAWDETLLDKFYTELYQQLNDLEACVIQGVGVTETPLMKEDAILAVRKYFQRITLYLKEKKYSPCAWEVVRAEIMRSFSLSTNLQESLRSKE

SEQ ID NO: 73 - protein, 165 aa, Artificial Sequence
  Y122A Mutant IFN-alpha 2b
CDLPQTHSLGSRRTLMLLAQMRRISLFSCLKDRHDFGFPQEEFGNQFQKAETIPVLHEMIQQIFNLFSTKDSSAAWDETLLDKFYTELYQQLNDLEACVIQGVGVTETPLMKEDSILAVRKAFQRITLYLKEKKYSPCAWEVVRAEIMRSFSLSTNLQESLRSKE

SEQ ID NO: 74 - protein, 165 aa, Artificial Sequence
  W140A Mutant IFN-alpha 2b
CDLPQTHSLGSRRTLMLLAQMRRISLFSCLKDRHDFGFPQEEFGNQFQKAETIPVLHEMIQQIFNLFSTKDSSAAWDETLLDKFYTELYQQLNDLEACVIQGVGVTETPLMKEDSILAVRKYFQRITLYLKEKKYSPCAAEVVRAEIMRSFSLSTNLQESLRSKE

SEQ ID NO: 75 - protein, 165 aa, Artificial Sequence
  E146A Mutant IFN-alpha 2b
CDLPQTHSLGSRRTLMLLAQMRRISLFSCLKDRHDFGFPQEEFGNQFQKAETIPVLHEMIQQIFNLFSTKDSSAAWDETLLDKFYTELYQQLNDLEACVIQGVGVTETPLMKEDSILAVRKYFQRITLYLKEKKYSPCAWEVVRAAIMRSFSLSTNLQESLRSKE

SEQ ID NO: 76 - protein, 165 aa, Artificial Sequence
  L3V Mutant IFN-alpha 2b
CDVPQTHSLGSRRTLMLLAQMRRISLFSCLKDRHDFGFPQEEFGNQFQKAETIPVLHEMIQQIFNLFSTKDSSAAWDETLLDKFYTELYQQLNDLEACVIQGVGVTETPLMKEDSILAVRKYFQRITLYLKEKKYSPCAWEVVRAEIMRSFSLSTNLQESLRSKE

SEQ ID NO: 77 - protein, 165 aa, Artificial Sequence
  R12H Mutant IFN-alpha 2b
CDLPQTHSLGSHRTLMLLAQMRRISLFSCLKDRHDFGFPQEEFGNQFQKAETIPVLHEMIQQIFNLFSTKDSSAAWDETLLDKFYTELYQQLNDLEACVIQGVGVTETPLMKEDSILAVRKYFQRITLYLKEKKYSPCAWEVVRAEIMRSFSLSTNLQESLRSKE

SEQ ID NO: 78 - protein, 165 aa, Artificial Sequence
  R13H Mutant IFN-alpha 2b
CDLPQTHSLGSRHTLMLLAQMRRISLFSCLKDRHDFGFPQEEFGNQFQKAETIPVLHEMIQQIFNLFSTKDSSAAWDETLLDKFYTELYQQLNDLEACVIQGVGVTETPLMKEDSILAVRKYFQRITLYLKEKKYSPCAWEVVRAEIMRSFSLSTNLQESLRSKE

SEQ ID NO: 79 - protein, 165 aa, Artificial Sequence
  M16V Mutant IFN-alpha 2b
CDLPQTHSLGSRRTLVLLAQMRRISLFSCLKDRHDFGFPQEEFGNQFQKAETIPVLHEMIQQIFNLFSTKDSSAAWDETLLDKFYTELYQQLNDLEACVIQGVGVTETPLMKEDSILAVRKYFQRITLYLKEKKYSPCAWEVVRAEIMRSFSLSTNLQESLRSKE

SEQ ID NO: 80 - protein, 165 aa, Artificial Sequence
  M16I Mutant IFN-alpha 2b
CDLPQTHSLGSRRTLILLAQMRRISLFSCLKDRHDFGFPQEEFGNQFQKAETIPVLHEMIQQIFNLFSTKDSSAAWDETLLDKFYTELYQQLNDLEACVIQGVGVTETPLMKEDSILAVRKYFQRITLYLKEKKYSPCAWEVVRAEIMRSFSLSTNLQESLRSKE

SEQ ID NO: 81 - protein, 165 aa, Artificial Sequence
  R22H Mutant IFN-alpha 2b
CDLPQTHSLGSRRTLMLLAQMHRISLFSCLKDRHDFGFPQEEFGNQFQKAETIPVLHEMIQQIFNLFSTKDSSAAWDETLLDKFYTELYQQLNDLEACVIQGVGVTETPLMKEDSILAVRKYFQRITLYLKEKKYSPCAWEVVRAEIMRSFSLSTNLQESLRSKE

SEQ ID NO: 82 - protein, 165 aa, Artificial Sequence
  F27I Mutant IFN-alpha 2b
CDLPQTHSLGSRRTLMLLAQMRRISLISCLKDRHDFGFPQEEFGNQFQKAETIPVLHEMIQQIFNLFSTKDSSAAWDETLLDKFYTELYQQLNDLEACVIQGVGVTETPLMKEDSILAVRKYFQRITLYLKEKKYSPCAWEVVRAEIMRSFSLSTNLQESLRSKE

SEQ ID NO: 83 - protein, 165 aa, Artificial Sequence
  F27V Mutant IFN-alpha 2b
CDLPQTHSLGSRRTLMLLAQMRRISLVSCLKDRHDFGFPQEEFGNQFQKAETIPVLHEMIQQIFNLFSTKDSSAAWDETLLDKFYTELYQQLNDLEACVIQGVGVTETPLMKEDSILAVRKYFQRITLYLKEKKYSPCAWEVVRAEIMRSFSLSTNLQESLRSKE

SEQ ID NO: 84 - protein, 165 aa, Artificial Sequence
  L30I Mutant IFN-alpha 2b
CDLPQTHSLGSRRTLMLLAQMRRISLFSCIKDRHDFGFPQEEFGNQFQKAETIPVLHEMIQQIFNLFSTKDSSAAWDETLLDKFYTELYQQLNDLEACVIQGVGVTETPLMKEDSILAVRKYFQRITLYLKEKKYSPCAWEVVRAEIMRSFSLSTNLQESLRSKE

SEQ ID NO: 85 - protein, 165 aa, Artificial Sequence
  K31Q Mutant IFN-alpha 2b
CDLPQTHSLGSRRTLMLLAQMRRISLFSCLQDRHDFGFPQEEFGNQFQKAETIPVLHEMIQQIFNLFSTKDSSAAWDETLLDKFYTELYQQLNDLEACVIQGVGVTETPLMKEDSILAVRKYFQRITLYLKEKKYSPCAWEVVRAEIMRSFSLSTNLQESLRSKE

SEQ ID NO: 86 - protein, 165 aa, Artificial Sequence
  R33H Mutant IFN-alpha 2b
CDLPQTHSLGSRRTLMLLAQMRRISLFSCLKDHHDFGFPQEEFGNQFQKAETIPVLHEMIQQIFNLFSTKDSSAAWDETLLDKFYTELYQQLNDLEACVIQGVGVTETPLMKEDSILAVRKYFQRITLYLKEKKYSPCAWEVVRAEIMRSFSLSTNLQESLRSKE

SEQ ID NO: 87 - protein, 165 aa, Artificial Sequence
  E41Q Mutant IFN-alpha 2b
CDLPQTHSLGSRRTLMLLAQMRRISLFSCLKDRHDFGFPQQEFGNQFQKAETIPVLHEMIQQIFNLFSTKDSSAAWDETLLDKFYTELYQQLNDLEACVIQGVGVTETPLMKEDSILAVRKYFQRITLYLKEKKYSPCAWEVVRAEIMRSFSLSTNLQESLRSKE

SEQ ID NO: 88 - protein, 165 aa, Artificial Sequence
  E41H Mutant IFN-alpha 2b
CDLPQTHSLGSRRTLMLLAQMRRISLFSCLKDRHDFGFPQHEFGNQFQKAETIPVLHEMIQQIFNLFSTKDSSAAWDETLLDKFYTELYQQLNDLEACVIQGVGVTETPLMKEDSILAVRKYFQRITLYLKEKKYSPCAWEVVRAEIMRSFSLSTNLQESLRSKE

SEQ ID NO: 89 - protein, 165 aa, Artificial Sequence
  E58Q Mutant IFN-alpha 2b
CDLPQTHSLGSRRTLMLLAQMRRISLFSCLKDRHDFGFPQEEFGNQFQKAETIPVLHQMIQQIFNLFSTKDSSAAWDETLLDKFYTELYQQLNDLEACVIQGVGVTETPLMKEDSILAVRKYFQRITLYLKEKKYSPCAWEVVRAEIMRSFSLSTNLQESLRSKE

SEQ ID NO: 90 - protein, 165 aa, Artificial Sequence
  E58H Mutant IFN-alpha 2b
CDLPQTHSLGSRRTLMLLAQMRRISLFSCLKDRHDFGFPQEEFGNQFQKAETIPVLHHMIQQIFNLFSTKDSSAAWDETLLDKFYTELYQQLNDLEACVIQGVGVTETPLMKEDSILAVRKYFQRITLYLKEKKYSPCAWEVVRAEIMRSFSLSTNLQESLRSKE

SEQ ID NO: 91 - protein, 165 aa, Artificial Sequence
  K70T Mutant IFN-alpha 2b
CDLPQTHSLGSRRTLMLLAQMRRISLFSCLKDRHDFGFPQEEFGNQFQKAETIPVLHEMIQQIFNLFSTTDSSAAWDETLLDKFYTELYQQLNDLEACVIQGVGVTETPLMKEDSILAVRKYFQRITLYLKEKKYSPCAWEVVRAEIMRSFSLSTNLQESLRSKE

SEQ ID NO: 92 - protein, 165 aa, Artificial Sequence
  E78Q Mutant IFN-alpha 2b
CDLPQTHSLGSRRTLMLLAQMRRISLFSCLKDRHDFGFPQEEFGNQFQKAETIPVLHEMIQQIFNLFSTKDSSAAWDQTLLDKFYTELYQQLNDLEACVIQGVGVTETPLMKEDSILAVRKYFQRITLYLKEKKYSPCAWEVVRAEIMRSFSLSTNLQESLRSKE

SEQ ID NO: 93 - protein, 165 aa, Artificial Sequence
  E78H Mutant IFN-alpha 2b
CDLPQTHSLGSRRTLMLLAQMRRISLFSCLKDRHDFGFPQEEFGNQFQKAETIPVLHEMIQQIFNLFSTKDSSAAWDHTLLDKFYTELYQQLNDLEACVIQGVGVTETPLMKEDSILAVRKYFQRITLYLKEKKYSPCAWEVVRAEIMRSFSLSTNLQESLRSKE

SEQ ID NO: 94 - protein, 165 aa, Artificial Sequence
  Y89I Mutant IFN-alpha 2b
CDLPQTHSLGSRRTLMLLAQMRRISLFSCLKDRHDFGFPQEEFGNQFQKAETIPVLHEMIQQIFNLFSTKDSSAAWDETLLDKFYTELIQQLNDLEACVIQGVGVTETPLMKEDSILAVRKYFQRITLYLKEKKYSPCAWEVVRAEIMRSFSLSTNLQESLRSKE

SEQ ID NO: 95 - protein, 165 aa, Artificial Sequence
  E107Q Mutant IFN-alpha 2b
CDLPQTHSLGSRRTLMLLAQMRRISLFSCLKDRHDFGFPQEEFGNQFQKAETIPVLHEMIQQIFNLFSTKDSSAAWDETLLDKFYTELYQQLNDLEACVIQGVGVTQTPLMKEDSILAVRKYFQRITLYLKEKKYSPCAWEVVRAEIMRSFSLSTNLQESLRSKE

SEQ ID NO: 96 - protein, 165 aa, Artificial Sequence
  E107H Mutant IFN-alpha 2b
CDLPQTHSLGSRRTLMLLAQMRRISLFSCLKDRHDFGFPQEEFGNQFQKAETIPVLHEMIQQIFNLFSTKDSSAAWDETLLDKFYTELYQQLNDLEACVIQGVGVTHTPLMKEDSILAVRKYFQRITLYLKEKKYSPCAWEVVRAEIMRSFSLSTNLQESLRSKE

SEQ ID NO: 97 - protein, 165 aa, Artificial Sequence
  P109A Mutant IFN-alpha 2b
CDLPQTHSLGSRRTLMLLAQMRRISLFSCLKDRHDFGFPQEEFGNQFQKAETIPVLHEMIQQIFNLFSTKDSSAAWDETLLDKFYTELYQQLNDLEACVIQGVGVTETALMKEDSILAVRKYFQRITLYLKEKKYSPCAWEVVRAEIMRSFSLSTNLQESLRSKE

SEQ ID NO: 98 - protein, 165 aa, Artificial Sequence
  L110V Mutant IFN-alpha 2b
CDLPQTHSLGSRRTLMLLAQMRRISLFSCLKDRHDFGFPQEEFGNQFQKAETIPVLHEMIQQIFNLFSTKDSSAAWDETLLDKFYTELYQQLNDLEACVIQGVGVTETPVMKEDSILAVRKYFQRITLYLKEKKYSPCAWEVVRAEIMRSFSLSTNLQESLRSKE

SEQ ID NO: 99 - protein, 165 aa, Artificial Sequence
  M111I Mutant IFN-alpha 2b
CDLPQTHSLGSRRTLMLLAQMRRISLFSCLKDRHDFGFPQEEFGNQFQKAETIPVLHEMIQQIFNLFSTKDSSAAWDETLLDKFYTELYQQLNDLEACVIQGVGVTETPLIKEDSILAVRKYFQRITLYLKEKKYSPCAWEVVRAEIMRSFSLSTNLQESLRSKE

SEQ ID NO: 100 - protein, 165 aa, Artificial Sequence
  E113Q Mutant IFN-alpha 2b
CDLPQTHSLGSRRTLMLLAQMRRISLFSCLKDRHDFGFPQEEFGNQFQKAETIPVLHEMIQQIFNLFSTKDSSAAWDETLLDKFYTELYQQLNDLEACVIQGVGVTETPLMKQDSILAVRKYFQRITLYLKEKKYSPCAWEVVRAEIMRSFSLSTNLQESLRSKE

SEQ ID NO: 101 - protein, 165 aa, Artificial Sequence
  E113H Mutant IFN-alpha 2b
CDLPQTHSLGSRRTLMLLAQMRRISLFSCLKDRHDFGFPQEEFGNQFQKAETIPVLHEMIQQIFNLFSTKDSSAAWDETLLDKFYTELYQQLNDLEACVIQGVGVTETPLMKHDSILAVRKYFQRITLYLKEKKYSPCAWEVVRAEIMRSFSLSTNLQESLRSKE

SEQ ID NO: 102 - protein, 165 aa, Artificial Sequence
  L117V Mutant IFN-alpha 2b
CDLPQTHSLGSRRTLMLLAQMRRISLFSCLKDRHDFGFPQEEFGNQFQKAETIPVLHEMIQQIFNLFSTKDSSAAWDETLLDKFYTELYQQLNDLEACVIQGVGVTETPLMKEDSIVAVRKYFQRITLYLKEKKYSPCAWEVVRAEIMRSFSLSTNLQESLRSKE

SEQ ID NO: 103 - protein, 165 aa, Artificial Sequence
  L117I Mutant IFN-alpha 2b
CDLPQTHSLGSRRTLMLLAQMRRISLFSCLKDRHDFGFPQEEFGNQFQKAETIPVLHEMIQQIFNLFSTKDSSAAWDETLLDKFYTELYQQLNDLEACVIQGVGVTETPLMKEDSIIAVRKYFQRITLYLKEKKYSPCAWEVVRAEIMRSFSLSTNLQESLRSKE

SEQ ID NO: 104 - protein, 165 aa, Artificial Sequence
  K121Q Mutant IFN-alpha 2b
CDLPQTHSLGSRRTLMLLAQMRRISLFSCLKDRHDFGFPQEEFGNQFQKAETIPVLHEMIQQIFNLFSTKDSSAAWDETLLDKFYTELYQQLNDLEACVIQGVGVTETPLMKEDSILAVRQYFQRITLYLKEKKYSPCAWEVVRAEIMRSFSLSTNLQESLRSKE

SEQ ID NO: 105 - protein, 165 aa, Artificial Sequence
  K121T Mutant IFN-alpha 2b
CDLPQTHSLGSRRTLMLLAQMRRISLFSCLKDRHDFGFPQEEFGNQFQKAETIPVLHEMIQQIFNLFSTKDSSAAWDETLLDKFYTELYQQLNDLEACVIQGVGVTETPLMKEDSILAVRTYFQRITLYLKEKKYSPCAWEVVRAEIMRSFSLSTNLQESLRSKE

SEQ ID NO: 106 - protein, 165 aa, Artificial Sequence
  R125H Mutant IFN-alpha 2b
CDLPQTHSLGSRRTLMLLAQMRRISLFSCLKDRHDFGFPQEEFGNQFQKAETIPVLHEMIQQIFNLFSTKDSSAAWDETLLDKFYTELYQQLNDLEACVIQGVGVTETPLMKEDSILAVRKYFQHITLYLKEKKYSPCAWEVVRAEIMRSFSLSTNLQESLRSKE

SEQ ID NO: 107 - protein, 165 aa, Artificial Sequence
  R125Q Mutant IFN-alpha 2b
CDLPQTHSLGSRRTLMLLAQMRRISLFSCLKDRHDFGFPQEEFGNQFQKAETIPVLHEMIQQIFNLFSTKDSSAAWDETLLDKFYTELYQQLNDLEACVIQGVGVTETPLMKEDSILAVRKYFQQITLYLKEKKYSPCAWEVVRAEIMRSFSLSTNLQESLRSKE

SEQ ID NO: 108 - protein, 165 aa, Artificial Sequence
  L128V Mutant IFN-alpha 2b
CDLPQTHSLGSRRTLMLLAQMRRISLFSCLKDRHDFGFPQEEFGNQFQKAETIPVLHEMIQQIFNLFSTKDSSAAWDETLLDKFYTELYQQLNDLEACVIQGVGVTETPLMKEDSILAVRKYFQRITVYLKEKKYSPCAWEVVRAEIMRSFSLSTNLQESLRSKE

SEQ ID NO: 109 - protein, 165 aa, Artificial Sequence
  L128I Mutant IFN-alpha 2b
CDLPQTHSLGSRRTLMLLAQMRRISLFSCLKDRHDFGFPQEEFGNQFQKAETIPVLHEMIQQIFNLFSTKDSSAAWDETLLDKFYTELYQQLNDLEACVIQGVGVTETPLMKEDSILAVRKYFQRITIYLKEKKYSPCAWEVVRAEIMRSFSLSTNLQESLRSKE

SEQ ID NO: 110 - protein, 165 aa, Artificial Sequence
  K131Q Mutant IFN-alpha 2b
CDLPQTHSLGSRRTLMLLAQMRRISLFSCLKDRHDFGFPQEEFGNQFQKAETIPVLHEMIQQIFNLFSTKDSSAAWDETLLDKFYTELYQQLNDLEACVIQGVGVTETPLMKEDSILAVRKYFQRITLYLQEKKYSPCAWEVVRAEIMRSFSLSTNLQESLRSKE

SEQ ID NO: 111 - protein, 165 aa, Artificial Sequence
  K131T Mutant IFN-alpha 2b
CDLPQTHSLGSRRTLMLLAQMRRISLFSCLKDRHDFGFPQEEFGNQFQKAETIPVLHEMIQQIFNLFSTKDSSAAWDETLLDKFYTELYQQLNDLEACVIQGVGVTETPLMKEDSILAVRKYFQRITLYLTEKKYSPCAWEVVRAEIMRSFSLSTNLQESLRSKE

SEQ ID NO: 112 - protein, 165 aa, Artificial Sequence
  E132Q Mutant IFN-alpha 2b
CDLPQTHSLGSRRTLMLLAQMRRISLFSCLKDRHDFGFPQEEFGNQFQKAETIPVLHEMIQQIFNLFSTKDSSAAWDETLLDKFYTELYQQLNDLEACVIQGVGVTETPLMKEDSILAVRKYFQRITLYLKQKKYSPCAWEVVRAEIMRSFSLSTNLQESLRSKE

SEQ ID NO: 113 - protein, 165 aa, Artificial Sequence
  E132H Mutant IFN-alpha 2b
CDLPQTHSLGSRRTLMLLAQMRRISLFSCLKDRHDFGFPQEEFGNQFQKAETIPVLHEMIQQIFNLFSTKDSSAAWDETLLDKFYTELYQQLNDLEACVIQGVGVTETPLMKEDSILAVRKYFQRITLYLKHKKYSPCAWEVVRAEIMRSFSLSTNLQESLRSKE

SEQ ID NO: 114 - protein, 165 aa, Artificial Sequence
  K133Q Mutant IFN-alpha 2b
CDLPQTHSLGSRRTLMLLAQMRRISLFSCLKDRHDFGFPQEEFGNQFQKAETIPVLHEMIQQIFNLFSTKDSSAAWDETLLDKFYTELYQQLNDLEACVIQGVGVTETPLMKEDSILAVRKYFQRITLYLKEQKYSPCAWEVVRAEIMRSFSLSTNLQESLRSKE

SEQ ID NO: 115 - protein, 165 aa, Artificial Sequence
  K133T Mutant IFN-alpha 2b
CDLPQTHSLGSRRTLMLLAQMRRISLFSCLKDRHDFGFPQEEFGNQFQKAETIPVLHEMIQQIFNLFSTKDSSAAWDETLLDKFYTELYQQLNDLEACVIQGVGVTETPLMKEDSILAVRKYFQRITLYLKETKYSPCAWEVVRAEIMRSFSLSTNLQESLRSKE

SEQ ID NO: 116 - protein, 165 aa, Artificial Sequence
  K134Q Mutant IFN-alpha 2b
CDLPQTHSLGSRRTLMLLAQMRRISLFSCLKDRHDFGFPQEEFGNQFQKAETIPVLHEMIQQIFNLFSTKDSSAAWDETLLDKFYTELYQQLNDLEACVIQGVGVTETPLMKEDSILAVRKYFQRITLYLKEKQYSPCAWEVVRAEIMRSFSLSTNLQESLRSKE

SEQ ID NO: 117 - protein, 165 aa, Artificial Sequence
  Y135H Mutant IFN-alpha 2b
CDLPQTHSLGSRRTLMLLAQMRRISLFSCLKDRHDFGFPQEEFGNQFQKAETIPVLHEMIQQIFNLFSTKDSSAAWDETLLDKFYTELYQQLNDLEACVIQGVGVTETPLMKEDSILAVRKYFQRITLYLKEKKHSPCAWEVVRAEIMRSFSLSTNLQESLRSKE

SEQ ID NO: 118 - protein, 165 aa, Artificial Sequence
  Y135I Mutant IFN-alpha 2b
CDLPQTHSLGSRRTLMLLAQMRRISLFSCLKDRHDFGFPQEEFGNQFQKAETIPVLHEMIQQIFNLFSTKDSSAAWDETLLDKFYTELYQQLNDLEACVIQGVGVTETPLMKEDSILAVRKYFQRITLYLKEKKISPCAWEVVRAEIMRSFSLSTNLQESLRSKE

SEQ ID NO: 119 - protein, 165 aa, Artificial Sequence
  P137A Mutant IFN-alpha 2b
CDLPQTHSLGSRRTLMLLAQMRRISLFSCLKDRHDFGFPQEEFGNQFQKAETIPVLHEMIQQIFNLFSTKDSSAAWDETLLDKFYTELYQQLNDLEACVIQGVGVTETPLMKEDSILAVRKYFQRITLYLKEKKYSACAWEVVRAEIMRSFSLSTNLQESLRSKE

SEQ ID NO: 120 - protein, 165 aa, Artificial Sequence
  M148V Mutant IFN-alpha 2b
CDLPQTHSLGSRRTLMLLAQMRRISLFSCLKDRHDFGFPQEEFGNQFQKAETIPVLHEMIQQIFNLFSTKDSSAAWDETLLDKFYTELYQQLNDLEACVIQGVGVTETPLMKEDSILAVRKYFQRITLYLKEKKYSPCAWEVVRAEIVRSFSLSTNLQESLRSKE

SEQ ID NO: 121 - protein, 165 aa, Artificial Sequence
  M148I Mutant IFN-alpha 2b
CDLPQTHSLGSRRTLMLLAQMRRISLFSCLKDRHDFGFPQEEFGNQFQKAETIPVLHEMIQQIFNLFSTKDSSAAWDETLLDKFYTELYQQLNDLEACVIQGVGVTETPLMKEDSILAVRKYFQRITLYLKEKKYSPCAWEVVRAEIIRSFSLSTNLQESLRSKE

SEQ ID NO: 122 - protein, 165 aa, Artificial Sequence
  R149H Mutant IFN-alpha 2b
CDLPQTHSLGSRRTLMLLAQMRRISLFSCLKDRHDFGFPQEEFGNQFQKAETIPVLHEMIQQIFNLFSTKDSSAAWDETLLDKFYTELYQQLNDLEACVIQGVGVTETPLMKEDSILAVRKYFQRITLYLKEKKYSPCAWEVVRAEIMHSFSLSTNLQESLRSKE

SEQ ID NO: 123 - protein, 165 aa, Artificial Sequence
  R149Q Mutant IFN-alpha 2b
CDLPQTHSLGSRRTLMLLAQMRRISLFSCLKDRHDFGFPQEEFGNQFQKAETIPVLHEMIQQIFNLFSTKDSSAAWDETLLDKFYTELYQQLNDLEACVIQGVGVTETPLMKEDSILAVRKYFQRITLYLKEKKYSPCAWEVVRAEIMQSFSLSTNLQESLRSKE

SEQ ID NO: 124 - protein, 165 aa, Artificial Sequence
  E159Q Mutant IFN-alpha 2b
CDLPQTHSLGSRRTLMLLAQMRRISLFSCLKDRHDFGFPQEEFGNQFQKAETIPVLHEMIQQIFNLFSTKDSSAAWDETLLDKFYTELYQQLNDLEACVIQGVGVTETPLMKEDSILAVRKYFQRITLYLKEKKYSPCAWEVVRAEIMRSFSLSTNLQQSLRSKE

SEQ ID NO: 125 - protein, 165 aa, Artificial Sequence
  E159H Mutant IFN-alpha 2b
CDLPQTHSLGSRRTLMLLAQMRRISLFSCLKDRHDFGFPQEEFGNQFQKAETIPVLHEMIQQIFNLFSTKDSSAAWDETLLDKFYTELYQQLNDLEACVIQGVGVTETPLMKEDSILAVRKYFQRITLYLKEKKYSPCAWEVVRAEIMRSFSLSTNLQHSLRSKE

SEQ ID NO: 126 - protein, 165 aa, Artificial Sequence
  P4S Mutant IFN-alpha 2b
CDLSQTHSLGSRRTLMLLAQMRRISLFSCLKDRHDFGFPQEEFGNQFQKAETIPVLHEMIQQIFNLFSTKDSSAAWDETLLDKFYTELYQQLNDLEACVIQGVGVTETPLMKEDSILAVRKYFQRITLYLKEKKYSPCAWEVVRAEIMRSFSLSTNLQESLRSKE

SEQ ID NO: 127 - protein, 165 aa, Artificial Sequence
  Q5N/H7S Mutant IFN-alpha 2b
CDLPNTSSLGSRRTLMLLAQMRRISLFSCLKDRHDFGFPQEEFGNQFQKAETIPVLHEMIQQIFNLFSTKDSSAAWDETLLDKFYTELYQQLNDLEACVIQGVGVTETPLMKEDSILAVRKYFQRITLYLKEKKYSPCAWEVVRAEIMRSFSLSTNLQESLRSKE

SEQ ID NO: 128 - protein, 165 aa, Artificial Sequence
  Q5N/H7T Mutant IFN-alpha 2b
CDLPNTTSLGSRRTLMLLAQMRRISLFSCLKDRHDFGFPQEEFGNQFQKAETIPVLHEMIQQIFNLFSTKDSSAAWDETLLDKFYTELYQQLNDLEACVIQGVGVTETPLMKEDSILAVRKYFQRITLYLKEKKYSPCAWEVVRAEIMRSFSLSTNLQESLRSKE

SEQ ID NO: 129 - protein, 165 aa, Artificial Sequence
  T6N/S8S Mutant IFN-alpha 2b
CDLPQNHSLGSRRTLMLLAQMRRISLFSCLKDRHDFGFPQEEFGNQFQKAETIPVLHEMIQQIFNLFSTKDSSAAWDETLLDKFYTELYQQLNDLEACVIQGVGVTETPLMKEDSILAVRKYFQRITLYLKEKKYSPCAWEVVRAEIMRSFSLSTNLQESLRSKE

SEQ ID NO: 130 - protein, 165 aa, Artificial Sequence
  S8N/G10S Mutant IFN-alpha 2b
CDLPQTHNLSSRRTLMLLAQMRRISLFSCLKDRHDFGFPQEEFGNQFQKAETIPVLHEMIQQIFNLFSTKDSSAAWDETLLDKFYTELYQQLNDLEACVIQGVGVTETPLMKEDSILAVRKYFQRITLYLKEKKYSPCAWEVVRAEIMRSFSLSTNLQESLRSKE

SEQ ID NO: 131 - protein, 165 aa, Artificial Sequence
  S8N/G10T Mutant IFN-alpha 2b
CDLPQTHNLTSRRTLMLLAQMRRISLFSCLKDRHDFGFPQEEFGNQFQKAETIPVLHEMIQQIFNLFSTKDSSAAWDETLLDKFYTELYQQLNDLEACVIQGVGVTETPLMKEDSILAVRKYFQRITLYLKEKKYSPCAWEVVRAEIMRSFSLSTNLQESLRSKE

SEQ ID NO: 132 - protein, 165 aa, Artificial Sequence
  M21N/R23S Mutant IFN-alpha 2b
CDLPQTHSLGSRRTLMLLAQNRSISLFSCLKDRHDFGFPQEEFGNQFQKAETIPVLHEMIQQIFNLFSTKDSSAAWDETLLDKFYTELYQQLNDLEACVIQGVGVTETPLMKEDSILAVRKYFQRITLYLKEKKYSPCAWEVVRAEIMRSFSLSTNLQESLRSKE

SEQ ID NO: 133 - protein, 165 aa, Artificial Sequence
  R23N/S25T Mutant IFN-alpha 2b
CDLPQTHSLGSRRTLMLLAQMRNITLFSCLKDRHDFGFPQEEFGNQFQKAETIPVLHEMIQQIFNLFSTKDSSAAWDETLLDKFYTELYQQLNDLEACVIQGVGVTETPLMKEDSILAVRKYFQRITLYLKEKKYSPCAWEVVRAEIMRSFSLSTNLQESLRSKE

SEQ ID NO: 134 - protein, 165 aa, Artificial Sequence
  I24N/L26S Mutant IFN-alpha 2b
CDLPQTHSLGSRRTLMLLAQMRRNSSFSCLKDRHDFGFPQEEFGNQFQKAETIPVLHEMIQQIFNLFSTKDSSAAWDETLLDKFYTELYQQLNDLEACVIQGVGVTETPLMKEDSILAVRKYFQRITLYLKEKKYSPCAWEVVRAEIMRSFSLSTNLQESLRSKE

SEQ ID NO: 135 - protein, 165 aa, Artificial Sequence
  S25N/F27S Mutant IFN-alpha 2b
CDLPQTHSLGSRRTLMLLAQMRRINLSSCLKDRHDFGFPQEEFGNQFQKAETIPVLHEMIQQIFNLFSTKDSSAAWDETLLDKFYTELYQQLNDLEACVIQGVGVTETPLMKEDSILAVRKYFQRITLYLKEKKYSPCAWEVVRAEIMRSFSLSTNLQESLRSKE

SEQ ID NO: 136 - protein, 165 aa, Artificial Sequence
  S25N/F27T Mutant IFN-alpha 2b
CDLPQTHSLGSRRTLMLLAQMRRINLTSCLKDRHDFGFPQEEFGNQFQKAETIPVLHEMIQQIFNLFSTKDSSAAWDETLLDKFYTELYQQLNDLEACVIQGVGVTETPLMKEDSILAVRKYFQRITLYLKEKKYSPCAWEVVRAEIMRSFSLSTNLQESLRSKE

SEQ ID NO: 137 - protein, 165 aa, Artificial Sequence
  L26N/S28S Mutant IFN-alpha 2b
CDLPQTHSLGSRRTLMLLAQMRRISNFSCLKDRHDFGFPQEEFGNQFQKAETIPVLHEMIQQIFNLFSTKDSSAAWDETLLDKFYTELYQQLNDLEACVIQGVGVTETPLMKEDSILAVRKYFQRITLYLKEKKYSPCAWEVVRAEIMRSFSLSTNLQESLRSKE

SEQ ID NO: 138 - protein, 165 aa, Artificial Sequence
  L26N/S28T Mutant IFN-alpha 2b
CDLPQTHSLGSRRTLMLLAQMRRISNFTCLKDRHDFGFPQEEFGNQFQKAETIPVLHEMIQQIFNLFSTKDSSAAWDETLLDKFYTELYQQLNDLEACVIQGVGVTETPLMKEDSILAVRKYFQRITLYLKEKKYSPCAWEVVRAEIMRSFSLSTNLQESLRSKE

SEQ ID NO: 139 - protein, 165 aa, Artificial Sequence
  L30N/D32S Mutant IFN-alpha 2b
CDLPQTHSLGSRRTLMLLAQMRRISLFSCNKSRHDFGFPQEEFGNQFQKAETIPVLHEMIQQIFNLFSTKDSSAAWDETLLDKFYTELYQQLNDLEACVIQGVGVTETPLMKEDSILAVRKYFQRITLYLKEKKYSPCAWEVVRAEIMRSFSLSTNLQESLRSKE

SEQ ID NO: 140 - protein, 165 aa, Artificial Sequence
  R33N/D35S Mutant IFN-alpha 2b
CDLPQTHSLGSRRTLMLLAQMRRISLFSCLKDNHSFGFPQEEFGNQFQKAETIPVLHEMIQQIFNLFSTKDSSAAWDETLLDKFYTELYQQLNDLEACVIQGVGVTETPLMKEDSILAVRKYFQRITLYLKEKKYSPCAWEVVRAEIMRSFSLSTNLQESLRSKE

SEQ ID NO: 141 - protein, 165 aa, Artificial Sequence
  R33N/D35T Mutant IFN-alpha 2b
CDLPQTHSLGSRRTLMLLAQMRRISLFSCLKDNHTFGFPQEEFGNQFQKAETIPVLHEMIQQIFNLFSTKDSSAAWDETLLDKFYTELYQQLNDLEACVIQGVGVTETPLMKEDSILAVRKYFQRITLYLKEKKYSPCAWEVVRAEIMRSFSLSTNLQESLRSKE

SEQ ID NO: 142 - protein, 165 aa, Artificial Sequence
  H34N/F36S Mutant IFN-alpha 2b
CDLPQTHSLGSRRTLMLLAQMRRISLFSCLKDRNDSGFPQEEFGNQFQKAETIPVLHEMIQQIFNLFSTKDSSAAWDETLLDKFYTELYQQLNDLEACVIQGVGVTETPLMKEDSILAVRKYFQRITLYLKEKKYSPCAWEVVRAEIMRSFSLSTNLQESLRSKE

SEQ ID NO: 143 - protein, 165 aa, Artificial Sequence
  H34N/F36T Mutant IFN-alpha 2b
CDLPQTHSLGSRRTLMLLAQMRRISLFSCLKDRNDTGFPQEEFGNQFQKAETIPVLHEMIQQIFNLFSTKDSSAAWDETLLDKFYTELYQQLNDLEACVIQGVGVTETPLMKEDSILAVRKYFQRITLYLKEKKYSPCAWEVVRAEIMRSFSLSTNLQESLRSKE

SEQ ID NO: 144 - protein, 165 aa, Artificial Sequence
  D35N/G37S Mutant IFN-alpha 2b
CDLPQTHSLGSRRTLMLLAQMRRISLFSCLKDRHNFSFPQEEFGNQFQKAETIPVLHEMIQQIFNLFSTKDSSAAWDETLLDKFYTELYQQLNDLEACVIQGVGVTETPLMKEDSILAVRKYFQRITLYLKEKKYSPCAWEVVRAEIMRSFSLSTNLQESLRSKE

SEQ ID NO: 145 - protein, 165 aa, Artificial Sequence
  F36N/F38S Mutant IFN-alpha 2b
CDLPQTHSLGSRRTLMLLAQMRRISLFSCLKDRHDNGSPQEEFGNQFQKAETIPVLHEMIQQIFNLFSTKDSSAAWDETLLDKFYTELYQQLNDLEACVIQGVGVTETPLMKEDSILAVRKYFQRITLYLKEKKYSPCAWEVVRAEIMRSFSLSTNLQESLRSKE

SEQ ID NO: 146 - protein, 165 aa, Artificial Sequence
  F36N/F38T Mutant IFN-alpha 2b
CDLPQTHSLGSRRTLMLLAQMRRISLFSCLKDRHDNGTPQEEFGNQFQKAETIPVLHEMIQQIFNLFSTKDSSAAWDETLLDKFYTELYQQLNDLEACVIQGVGVTETPLMKEDSILAVRKYFQRITLYLKEKKYSPCAWEVVRAEIMRSFSLSTNLQESLRSKE

SEQ ID NO: 147 - protein, 165 aa, Artificial Sequence
  G37N/P39T Mutant IFN-alpha 2b
CDLPQTHSLGSRRTLMLLAQMRRISLFSCLKDRHDFNFTQEEFGNQFQKAETIPVLHEMIQQIFNLFSTKDSSAAWDETLLDKFYTELYQQLNDLEACVIQGVGVTETPLMKEDSILAVRKYFQRITLYLKEKKYSPCAWEVVRAEIMRSFSLSTNLQESLRSKE

SEQ ID NO: 148 - protein, 165 aa, Artificial Sequence
  F38N/Q40S Mutant IFN-alpha 2b
CDLPQTHSLGSRRTLMLLAQMRRISLFSCLKDRHDFGNPSEEFGNQFQKAETIPVLHEMIQQIFNLFSTKDSSAAWDETLLDKFYTELYQQLNDLEACVIQGVGVTETPLMKEDSILAVRKYFQRITLYLKEKKYSPCAWEVVRAEIMRSFSLSTNLQESLRSKE

SEQ ID NO: 149 - protein, 165 aa, Artificial Sequence
  F38N/Q40T Mutant IFN-alpha 2b
CDLPQTHSLGSRRTLMLLAQMRRISLFSCLKDRHDFGNPTEEFGNQFQKAETIPVLHEMIQQIFNLFSTKDSSAAWDETLLDKFYTELYQQLNDLEACVIQGVGVTETPLMKEDSILAVRKYFQRITLYLKEKKYSPCAWEVVRAEIMRSFSLSTNLQESLRSKE

SEQ ID NO: 150 - protein, 165 aa, Artificial Sequence
  P39N/E41S Mutant IFN-alpha 2b
CDLPQTHSLGSRRTLMLLAQMRRISLFSCLKDRHDFGFNQSEFGNQFQKAETIPVLHEMIQQIFNLFSTKDSSAAWDETLLDKFYTELYQQLNDLEACVIQGVGVTETPLMKEDSILAVRKYFQRITLYLKEKKYSPCAWEVVRAEIMRSFSLSTNLQESLRSKE

SEQ ID NO: 151 - protein, 165 aa, Artificial Sequence
  P39N/E41T Mutant IFN-alpha 2b
CDLPQTHSLGSRRTLMLLAQMRRISLFSCLKDRHDFGFNQTEFGNQFQKAETIPVLHEMIQQIFNLFSTKDSSAAWDETLLDKFYTELYQQLNDLEACVIQGVGVTETPLMKEDSILAVRKYFQRITLYLKEKKYSPCAWEVVRAEIMRSFSLSTNLQESLRSKE

SEQ ID NO: 152 - protein, 165 aa, Artificial Sequence
  Q40N/E42S Mutant IFN-alpha 2b
CDLPQTHSLGSRRTLMLLAQMRRISLFSCLKDRHDFGFPNESFGNQFQKAETIPVLHEMIQQIFNLFSTKDSSAAWDETLLDKFYTELYQQLNDLEACVIQGVGVTETPLMKEDSILAVRKYFQRITLYLKEKKYSPCAWEVVRAEIMRSFSLSTNLQESLRSKE

SEQ ID NO: 153 - protein, 165 aa, Artificial Sequence
  Q40N/E42T Mutant IFN-alpha 2b
CDLPQTHSLGSRRTLMLLAQMRRISLFSCLKDRHDFGFPNETFGNQFQKAETIPVLHEMIQQIFNLFSTKDSSAAWDETLLDKFYTELYQQLNDLEACVIQGVGVTETPLMKEDSILAVRKYFQRITLYLKEKKYSPCAWEVVRAEIMRSFSLSTNLQESLRSKE

SEQ ID NO: 154 - protein, 165 aa, Artificial Sequence
  E41N/F43S Mutant IFN-alpha 2b
CDLPQTHSLGSRRTLMLLAQMRRISLFSCLKDRHDFGFPQNESGNQFQKAETIPVLHEMIQQIFNLFSTKDSSAAWDETLLDKFYTELYQQLNDLEACVIQGVGVTETPLMKEDSILAVRKYFQRITLYLKEKKYSPCAWEVVRAEIMRSFSLSTNLQESLRSKE

SEQ ID NO: 155 - protein, 165 aa, Artificial Sequence
  E41N/F43T Mutant IFN-alpha 2b
CDLPQTHSLGSRRTLMLLAQMRRISLFSCLKDRHDFGFPQNETGNQFQKAETIPVLHEMIQQIFNLFSTKDSSAAWDETLLDKFYTELYQQLNDLEACVIQGVGVTETPLMKEDSILAVRKYFQRITLYLKEKKYSPCAWEVVRAEIMRSFSLSTNLQESLRSKE

SEQ ID NO: 156 - protein, 165 aa, Artificial Sequence
  G44N/Q46S Mutant IFN-alpha 2b
CDLPQTHSLGSRRTLMLLAQMRRISLFSCLKDRHDFGFPQEEFNNSFQKAETIPVLHEMIQQIFNLFSTKDSSAAWDETLLDKFYTELYQQLNDLEACVIQGVGVTETPLMKEDSILAVRKYFQRITLYLKEKKYSPCAWEVVRAEIMRSFSLSTNLQESLRSKE

SEQ ID NO: 157 - protein, 165 aa, Artificial Sequence
  G44N/Q46T Mutant IFN-alpha 2b
CDLPQTHSLGSRRTLMLLAQMRRISLFSCLKDRHDFGFPQEEFNNTFQKAETIPVLHEMIQQIFNLFSTKDSSAAWDETLLDKFYTELYQQLNDLEACVIQGVGVTETPLMKEDSILAVRKYFQRITLYLKEKKYSPCAWEVVRAEIMRSFSLSTNLQESLRSKE

SEQ ID NO: 158 - protein, 165 aa, Artificial Sequence
  N45N/F47S Mutant IFN-alpha 2b
CDLPQTHSLGSRRTLMLLAQMRRISLFSCLKDRHDFGFPQEEFGNQSQKAETIPVLHEMIQQIFNLFSTKDSSAAWDETLLDKFYTELYQQLNDLEACVIQGVGVTETPLMKEDSILAVRKYFQRITLYLKEKKYSPCAWEVVRAEIMRSFSLSTNLQESLRSKE

SEQ ID NO: 159 - protein, 165 aa, Artificial Sequence
  N45N/F47T Mutant IFN-alpha 2b
CDLPQTHSLGSRRTLMLLAQMRRISLFSCLKDRHDFGFPQEEFGNQTQKAETIPVLHEMIQQIFNLFSTKDSSAAWDETLLDKFYTELYQQLNDLEACVIQGVGVTETPLMKEDSILAVRKYFQRITLYLKEKKYSPCAWEVVRAEIMRSFSLSTNLQESLRSKE

SEQ ID NO: 160 - protein, 165 aa, Artificial Sequence
  Q46N/Q48S Mutant IFN-alpha 2b
CDLPQTHSLGSRRTLMLLAQMRRISLFSCLKDRHDFGFPQEEFGNNFSKAETIPVLHEMIQQIFNLFSTKDSSAAWDETLLDKFYTELYQQLNDLEACVIQGVGVTETPLMKEDSILAVRKYFQRITLYLKEKKYSPCAWEVVRAEIMRSFSLSTNLQESLRSKE

SEQ ID NO: 161 - protein, 165 aa, Artificial Sequence
  Q46N/Q48T Mutant IFN-alpha 2b
CDLPQTHSLGSRRTLMLLAQMRRISLFSCLKDRHDFGFPQEEFGNNFTKAETIPVLHEMIQQIFNLFSTKDSSAAWDETLLDKFYTELYQQLNDLEACVIQGVGVTETPLMKEDSILAVRKYFQRITLYLKEKKYSPCAWEVVRAEIMRSFSLSTNLQESLRSKE

SEQ ID NO: 162 - protein, 165 aa, Artificial Sequence
  F47N/K49S Mutant IFN-alpha 2b
CDLPQTHSLGSRRTLMLLAQMRRISLFSCLKDRHDFGFPQEEFGNQNQSAETIPVLHEMIQQIFNLFSTKDSSAAWDETLLDKFYTELYQQLNDLEACVIQGVGVTETPLMKEDSILAVRKYFQRITLYLKEKKYSPCAWEVVRAEIMRSFSLSTNLQESLRSKE

SEQ ID NO: 163 - protein, 165 aa, Artificial Sequence
  F47N/K49T Mutant IFN-alpha 2b
CDLPQTHSLGSRRTLMLLAQMRRISLFSCLKDRHDFGFPQEEFGNQNQTAETIPVLHEMIQQIFNLFSTKDSSAAWDETLLDKFYTELYQQLNDLEACVIQGVGVTETPLMKEDSILAVRKYFQRITLYLKEKKYSPCAWEVVRAEIMRSFSLSTNLQESLRSKE

SEQ ID NO: 164 - protein, 165 aa, Artificial Sequence
  K49N/E51S Mutant IFN-alpha 2b
CDLPQTHSLGSRRTLMLLAQMRRISLFSCLKDRHDFGFPQEEFGNQFQNASTIPVLHEMIQQIFNLFSTKDSSAAWDETLLDKFYTELYQQLNDLEACVIQGVGVTETPLMKEDSILAVRKYFQRITLYLKEKKYSPCAWEVVRAEIMRSFSLSTNLQESLRSKE

SEQ ID NO: 165 - protein, 165 aa, Artificial Sequence
  A75N/D77S Mutant IFN-alpha 2b
CDLPQTHSLGSRRTLMLLAQMRRISLFSCLKDRHDFGFPQEEFGNQFQKAETIPVLHEMIQQIFNLFSTKDSSANWSETLLDKFYTELYQQLNDLEACVIQGVGVTETPLMKEDSILAVRKYFQRITLYLKEKKYSPCAWEVVRAEIMRSFSLSTNLQESLRSKE

SEQ ID NO: 166 - protein, 165 aa, Artificial Sequence
  I100N/G102S Mutant IFN-alpha 2b
CDLPQTHSLGSRRTLMLLAQMRRISLFSCLKDRHDFGFPQEEFGNQFQKAETIPVLHEMIQQIFNLFSTKDSSAAWDETLLDKFYTELYQQLNDLEACVNQSVGVTETPLMKEDSILAVRKYFQRITLYLKEKKYSPCAWEVVRAEIMRSFSLSTNLQESLRSKE

SEQ ID NO: 167 - protein, 165 aa, Artificial Sequence
  I100N/G102T Mutant IFN-alpha 2b
CDLPQTHSLGSRRTLMLLAQMRRISLFSCLKDRHDFGFPQEEFGNQFQKAETIPVLHEMIQQIFNLFSTKDSSAAWDETLLDKFYTELYQQLNDLEACVNQTVGVTETPLMKEDSILAVRKYFQRITLYLKEKKYSPCAWEVVRAEIMRSFSLSTNLQESLRSKE

SEQ ID NO: 168 - protein, 165 aa, Artificial Sequence
  V103N/V105S Mutant IFN-alpha 2b
CDLPQTHSLGSRRTLMLLAQMRRISLFSCLKDRHDFGFPQEEFGNQFQKAETIPVLHEMIQQIFNLFSTKDSSAAWDETLLDKFYTELYQQLNDLEACVIQGNGSTETPLMKEDSILAVRKYFQRITLYLKEKKYSPCAWEVVRAEIMRSFSLSTNLQESLRSKE

SEQ ID NO: 169 - protein, 165 aa, Artificial Sequence
  V103N/V105T Mutant IFN-alpha 2b
CDLPQTHSLGSRRTLMLLAQMRRISLFSCLKDRHDFGFPQEEFGNQFQKAETIPVLHEMIQQIFNLFSTKDSSAAWDETLLDKFYTELYQQLNDLEACVIQGNGTTETPLMKEDSILAVRKYFQRITLYLKEKKYSPCAWEVVRAEIMRSFSLSTNLQESLRSKE

SEQ ID NO: 170 - protein, 165 aa, Artificial Sequence
  G104N/T106T Mutant IFN-alpha 2b
CDLPQTHSLGSRRTLMLLAQMRRISLFSCLKDRHDFGFPQEEFGNQFQKAETIPVLHEMIQQIFNLFSTKDSSAAWDETLLDKFYTELYQQLNDLEACVIQGVNVTETPLMKEDSILAVRKYFQRITLYLKEKKYSPCAWEVVRAEIMRSFSLSTNLQESLRSKE

SEQ ID NO: 171 - protein, 165 aa, Artificial Sequence
  V105N/E107S Mutant IFN-alpha 2b
CDLPQTHSLGSRRTLMLLAQMRRISLFSCLKDRHDFGFPQEEFGNQFQKAETIPVLHEMIQQIFNLFSTKDSSAAWDETLLDKFYTELYQQLNDLEACVIQGVGNTSTPLMKEDSILAVRKYFQRITLYLKEKKYSPCAWEVVRAEIMRSFSLSTNLQESLRSKE

SEQ ID NO: 172 - protein, 165 aa, Artificial Sequence
  T106N/T108S Mutant IFN-alpha 2b
CDLPQTHSLGSRRTLMLLAQMRRISLFSCLKDRHDFGFPQEEFGNQFQKAETIPVLHEMIQQIFNLFSTKDSSAAWDETLLDKFYTELYQQLNDLEACVIQGVGVNESPLMKEDSILAVRKYFQRITLYLKEKKYSPCAWEVVRAEIMRSFSLSTNLQESLRSKE

SEQ ID NO: 173 - protein, 165 aa, Artificial Sequence
  T106N/T108T Mutant IFN-alpha 2b
CDLPQTHSLGSRRTLMLLAQMRRISLFSCLKDRHDFGFPQEEFGNQFQKAETIPVLHEMIQQIFNLFSTKDSSAAWDETLLDKFYTELYQQLNDLEACVIQGVGVNETPLMKEDSILAVRKYFQRITLYLKEKKYSPCAWEVVRAEIMRSFSLSTNLQESLRSKE

SEQ ID NO: 174 - protein, 165 aa, Artificial Sequence
  E107N/P109S Mutant IFN-alpha 2b
CDLPQTHSLGSRRTLMLLAQMRRISLFSCLKDRHDFGFPQEEFGNQFQKAETIPVLHEMIQQIFNLFSTKDSSAAWDETLLDKFYTELYQQLNDLEACVIQGVGVTNTSLMKEDSILAVRKYFQRITLYLKEKKYSPCAWEVVRAEIMRSFSLSTNLQESLRSKE

SEQ ID NO: 175 - protein, 165 aa, Artificial Sequence
  E107N/P109T Mutant IFN-alpha 2b
CDLPQTHSLGSRRTLMLLAQMRRISLFSCLKDRHDFGFPQEEFGNQFQKAETIPVLHEMIQQIFNLFSTKDSSAAWDETLLDKFYTELYQQLNDLEACVIQGVGVTNTTLMKEDSILAVRKYFQRITLYLKEKKYSPCAWEVVRAEIMRSFSLSTNLQESLRSKE

SEQ ID NO: 176 - protein, 165 aa, Artificial Sequence
  K134N/S136T Mutant IFN-alpha 2b
CDLPQTHSLGSRRTLMLLAQMRRISLFSCLKDRHDFGFPQEEFGNQFQKAETIPVLHEMIQQIFNLFSTKDSSAAWDETLLDKFYTELYQQLNDLEACVIQGVGVTETPLMKEDSILAVRKYFQRITLYLKEKNYTPCAWEVVRAEIMRSFSLSTNLQESLRSKE

SEQ ID NO: 177 - protein, 165 aa, Artificial Sequence
  L157N/E159S Mutant IFN-alpha 2b
CDLPQTHSLGSRRTLMLLAQMRRISLFSCLKDRHDFGFPQEEFGNQFQKAETIPVLHEMIQQIFNLFSTKDSSAAWDETLLDKFYTELYQQLNDLEACVIQGVGVTETPLMKEDSILAVRKYFQRITLYLKEKKYSPCAWEVVRAEIMRSFSLSTNNQSSLRSKE

SEQ ID NO: 178 - protein, 165 aa, Artificial Sequence
  L157N/E159T Mutant IFN-alpha 2b
CDLPQTHSLGSRRTLMLLAQMRRISLFSCLKDRHDFGFPQEEFGNQFQKAETIPVLHEMIQQIFNLFSTKDSSAAWDETLLDKFYTELYQQLNDLEACVIQGVGVTETPLMKEDSILAVRKYFQRITLYLKEKKYSPCAWEVVRAEIMRSFSLSTNNQTSLRSKE

SEQ ID NO: 179 - protein, 165 aa, Artificial Sequence
  Q158N/S160T Mutant IFN-alpha 2b
CDLPQTHSLGSRRTLMLLAQMRRISLFSCLKDRHDFGFPQEEFGNQFQKAETIPVLHEMIQQIFNLFSTKDSSAAWDETLLDKFYTELYQQLNDLEACVIQGVGVTETPLMKEDSILAVRKYFQRITLYLKEKKYSPCAWEVVRAEIMRSFSLSTNLNETLRSKE

SEQ ID NO: 180 - protein, 165 aa, Artificial Sequence
  E159N/L161S Mutant IFN-alpha 2b
CDLPQTHSLGSRRTLMLLAQMRRISLFSCLKDRHDFGFPQEEFGNQFQKAETIPVLHEMIQQIFNLFSTKDSSAAWDETLLDKFYTELYQQLNDLEACVIQGVGVTETPLMKEDSILAVRKYFQRITLYLKEKKYSPCAWEVVRAEIMRSFSLSTNLQNSSRSKE

SEQ ID NO: 181 - protein, 165 aa, Artificial Sequence
  E159N/L161T Mutant IFN-alpha 2b
CDLPQTHSLGSRRTLMLLAQMRRISLFSCLKDRHDFGFPQEEFGNQFQKAETIPVLHEMIQQIFNLFSTKDSSAAWDETLLDKFYTELYQQLNDLEACVIQGVGVTETPLMKEDSILAVRKYFQRITLYLKEKKYSPCAWEVVRAEIMRSFSLSTNLQNSTRSKE

SEQ ID NO: 182 - protein, 165 aa, Homo sapiens
  ref <308>: DATABASE ACCESSION NUMBER: Genbank CAA23805
  ref <309>: DATABASE ENTRY DATE: 1994-12-17
CDLPQTHSLGSRRTLMLLAQMRKISLFSCLKDRHDFGFPQEEFGNQFQKAETIPVLHEMIQQIFNLFSTKDSSAAWDETLLDKFYTELYQQLNDLEACVIQGVGVTETPLMKEDSILAVRKYFQRITLYLKEKKYSPCAWEVVRAEIMRSFSLSTNLQESLRSKE

SEQ ID NO: 183 - protein, 166 aa, Homo sapiens
  ref <308>: DATABASE ACCESSION NUMBER: Genbank P01566
  ref <309>: DATABASE ENTRY DATE: 1986-07-21
CDLPQTHSLGNRRALILLGQMGRISPFSCLKDRHDFRIPQEEFDGNQFQKAQAISVLHEMIQQTFNLFSTEDSSAAWEQSLLEKFSTELYQQLNDLEACVIQEVGVEETPLMNEDSILAVRKYFQRITLYLIERKYSPCAWEVVRAEIMRSLSFSTNLQKRLRRKD

SEQ ID NO: 184 - protein, 174 aa, Marmota monax
  ref <308>: DATABASE ACCESSION NUMBER: Genbank AAL76913
  ref <309>: DATABASE ENTRY DATE: 2002-02-12
CDLPQIHNLGLETSEENEEGALTLLEKMRRIPIFSCLNYRKDFAFPQEQLEGEQVQKAQAVAVLHQMTQQILNLFSTQKAFAAWDKTLLDTFLSGLYQLLDDLKACGSKQVGVEEAVRKYFHRITVYLKEKKYLPCAWEVVRTEIMKSFSLSVNLYERLRSMEGDLVQQGNASH

SEQ ID NO: 185 - protein, 165 aa, Homo sapiens
CDLPQTHSLGSRRTLMLLAQMRRISLFSCLKDRRDFGFPQEEFGNQFQKAETIPVLHEMIQQIFNLFSTKDSSAAWDETLLDKFYTELYQQLNDLEACVIQGVGVTETPLMKEDSILAVRKYFQRITLYLKEKKYSPCAWEVVRAEIMRSFSLSTNLQESLRSKE

SEQ ID NO: 186 - protein, 166 aa, Homo sapiens
  ref <308>: DATABASE ACCESSION NUMBER: Genbank AAB59403
  ref <309>: DATABASE ENTRY DATE: 1994-11-15
CDLPETHSLDNRRTLMLLAQMSRISPSSCLMDRHDFGFPQEEFDGNQFQKAPAISVLHELIQQIFNLFTTKDSSAAWDEDLLDKFCTELYQQLNDLEACVMQEERVGETPLMNADSILAVKKYFRRITLYLTEKKYSPCAWEVVRAEIMRSLSLSTNLQERLRRKE

SEQ ID NO: 187 - protein, 166 aa, Homo sapiens
  ref <308>: DATABASE ACCESSION NUMBER: Genbank CAA26702
  ref <309>: DATABASE ENTRY DATE: 1995-03-30
CDLPQTHSLSNRRTLMIMAQMGRISPFSCLKDRHDFGFPQEEFDGNQFQKAQAISVLHEMIQQTFNLFSTKDSSATWDETLLDKFYTELYQQLNDLEACMMQEVGVEDTPLMNVDSILTVRKYFQRITLYLTEKKYSPCAWEVVRAEIMRSFSLSANLQERLRRKE

SEQ ID NO: 188 - protein, 166 aa, Homo sapiens
  ref <308>: DATABASE ACCESSION NUMBER: Genbank CAA26704
  ref <309>: DATABASE ENTRY DATE: 1995-03-30
CDLPQTHSLGHRRTMMLLAQMRRISLFSCLKDRHDFRFPQEEFDGNQFQKAEAISVLHEVIQQTFNLFSTKDSSVAWDERLLDKLYTELYQQLNDLEACVMQEVWVGGTPLMNEDSILAVRKYFQRITLYLTEKKYSPCAWEVVRAEIMRSFSSSRNLQERLRRKE

SEQ ID NO: 189 - protein, 166 aa, Homo sapiens
  ref <308>: DATABASE ACCESSION NUMBER: Genbank NP_066546
  ref <309>: DATABASE ENTRY DATE: 2000-11-02
CDLPQTHSLGNRRALILLAQMGRISHFSCLKDRHDFGFPEEEFDGHQFQKAQAISVLHEMIQQTFNLFSTEDSSAAWEQSLLEKFSTELYQQLNDLEACVIQEVGVEETPLMNEDSILAVRKYFQRITLYLTEKKYSPCAWEVVRAEIMRSLSFSTNLQKRLRRKD

SEQ ID NO: 190 - protein, 166 aa, Homo sapiens
  ref <308>: DATABASE ACCESSION NUMBER: Genbank CAA26701
  ref <309>: DATABASE ENTRY DATE: 1995-03-30
CDLPQTHSLGNRRALILLAQMGRISHFSCLKDRHDFGFPEEEFDGHQFQKTQAISVLHEMIQQTFNLFSTEDSSAAWEQSLLEKFSTELYQQLNDLEACVIQEVGVEETPLMNVDSILAVRKYFQRITLYLTEKKYSPCAWEVVRAEIMRSLSFSTNLQKRLRRKD

SEQ ID NO: 191 - protein, 166 aa, Homo sapiens
  ref <308>: DATABASE ACCESSION NUMBER: Genbank AAA52725
  ref <309>: DATABASE ENTRY DATE: 1994-11-08
CDLPQTHSLGNRRALILLAQMGRISPFSCLKDRHDFGLPQEEFDGNQFQKTQAISVLHEMIQQTFNLFSTEDSSAAWEQSLLEKFSTELYQQLNNLEACVIQEVGMEETPLMNEDSILAVRKYFQRITLYLTEKKYSPCAWEVVRAEIMRSLSFSTNLQKILRRKD

SEQ ID NO: 192 - protein, 166 aa, Homo sapiens
  ref <308>: DATABASE ACCESSION NUMBER: Genbank CAA23792
  ref <309>: DATABASE ENTRY DATE: 1994-08-04
CDLPQTHSLRNRRALILLAQMGRISPFSCLKDRHEFRFPEEEFDGHQFQKTQAISVLHEMIQQTFNLFSTEDSSAAWEQSLLEKFSTELYQQLNDLEACVIQEVGVEETPLMNEDFILAVRKYFQRITLYLMEKKYSPCAWEVVRAEIMRSFSFSTNLKKGLRRKD

SEQ ID NO: 193 - protein, 166 aa, Homo sapiens
  ref <308>: DATABASE ACCESSION NUMBER: Genbank CAA23794
  ref <309>: DATABASE ENTRY DATE: 1994-12-17
CNLSQTHSLNNRRTLMLMAQMRRISPFSCLKDRHDFEFPQEEFDGNQFQKAQAISVLHEMMQQTFNLFSTKNSSAAWDETLLEKFYIELFQQMNDLEACVIQEVGVEETPLMNEDSILAVKKYFQRITLYLMEKKYSPCAWEVVRAEIMRSLSFSTNLQKRLRRKD

SEQ ID NO: 194 - protein, 166 aa, Homo sapiens
  ref <308>: DATABASE ACCESSION NUMBER: Genbank AAA52718
  ref <309>: DATABASE ENTRY DATE: 1994-11-08
CDLPQTHSLGNRRALILLAQMGRISPFSCLKDRHDFGFPQEEFDGNQFQKAQAISVLHEMIQQTFNLFSTKDSSATWEQSLLEKFSTELNQQLNDLEACVIQEVGVEETPLMNVDSILAVKKYFQRITLYLTEKKYSPCAWEVVRAEIMRSFSLSKIFQERLRRKE

SEQ ID NO: 195 - protein, 166 aa, Homo sapiens
  ref <308>: DATABASE ACCESSION NUMBER: Genbank CAA26903
  ref <309>: DATABASE ENTRY DATE: 1995-03-30
CDLPQTHSLGNRRALILLAQMRRISPFSCLKDRHDFEFPQEEFDDKQFQKAQAISVLHEMIQQTFNLFSTKDSSAALDETLLDEFYIELDQQLNDLESCVMQEVGVIESPLMYEDSILAVRKYFQRITLYLTEKKYSSCAWEVVRAEIMRSFSLSINLQKRLKSKE

SEQ ID NO: 196 - protein, 166 aa, Homo sapiens
  ref <308>: DATABASE ACCESSION NUMBER: Genbank AAC41702
  ref <309>: DATABASE ENTRY DATE: 1995-01-01
MSYNLLGFLQRSSNFQCQKLLWQLNGRLEYCLKDRMNFDIPEEIKQLQQFQKEDAALTIYEMLQNIFAIFRQDSSSTGWNETIVENLLANVYHQINHLKTVLEEKLEKEDFTRGKLMSSLHLKRYYGRILHYLKAKEYSHCAWTIVRVEILRNFYFINRLTGYLRN

SEQ ID NO: 197 - protein, 166 aa, Homo sapiens; identical to SEQ ID NO: 196
  ref <308>: DATABASE ACCESSION NUMBER: Genbank CAA23795
  ref <309>: DATABASE ENTRY DATE: 1993-09-12

SEQ ID NO: 198 - protein, 183 aa, Homo sapiens
  ref <308>: DATABASE ACCESSION NUMBER: Genbank CAA00839
  ref <309>: DATABASE ENTRY DATE: 1993-12-03
VPPGEDSKDVAAPHRQPLTSSERIDKQIRYILDGISALRKETCNKSNMCESSKEALAENNLNLPKMAEKDGCFQSGFNEETCLVKIITGLLEFEVYLEYLQNRFESSEEQARAVQMSTKVLIQFLQKKAKNLDAITTPDPTTNASLLTKLQAQNQWLQDMTTHLILRSFKEFLQSSLRALRQM

SEQ ID NO: 199 - protein, 146 aa, Homo sapiens
  ref <308>: DATABASE ACCESSION NUMBER: Genbank CAA31639
  ref <309>: DATABASE ENTRY DATE: 1994-11-15
CYCQDPYVKEAENLKKYFNAGHSDVADNGTLFLGILKNWKEESDRKIMQSQIVSFYFKLFKNFKDDQSIQKSVETIKEDMNVKFFNSNKKKRDDFEKLTNYSVTDLNVQRKAIHELIQVMAELSPAAKTGKRKRSQMLFQGRRASQ

SEQ ID NO: 200 - protein, 100 aa, Homo sapiens
  ref <308>: DATABASE ACCESSION NUMBER: Genbank NP_00063
  ref <309>: DATABASE ENTRY DATE: 2000-10-31
SPGQGTQSENSCTHFPGNLPNMLRDLRDAFSRVKTFFQMKDQLDNLLLKESLLEDFKGYLGCQALSEMIQFYLEEVMPQAENQDPDIKAHVNSLGENLKT

SEQ ID NO: 201 - protein, 166 aa, Homo sapiens
  ref <308>: DATABASE ACCESSION NUMBER: Genbank AAA52400
  ref <309>: DATABASE ENTRY DATE: 1994-11-08
APPRLICDSRVLERYLLEAKEAENITTGCAEHCSLNENITVPDTKVNFYAWKRMEVGQQAVEVWQGLALLSEAVLRGQALLVNSSQPWEPLQLHVDKAVSGLRSLTTLLRALGAQKEAISPPDAASAAPLRTITADTFRKLFRVYSNFLRGKLKLYTGEACRTGDR

SEQ ID NO: 202 - protein, 127 aa, Homo sapiens [sequence omitted]

SEQ ID NO: 203 - protein, 100 aa, Homo sapiens
  ref <308>: DATABASE ACCESSION NUMBER: Genbank AAA19825
  ref <309>: DATABASE ENTRY DATE: 1994-07-19
TQDCSFQHSPISSDFAVKIRELSDYLLQDYPVTVASNLQDEELCGGLWRLVLAQRWMERLKTVAGSKMQGLLERVNTEIHFVTKCAFQPPPSCLRFVQTN

SEQ ID NO: 204 - protein, 133 aa, Homo sapiens [sequence omitted]

SEQ ID NO: 205 - protein, 133 aa, Homo sapiens
  ref <308>: DATABASE ACCESSION NUMBER: Genbank AAA59146
  ref <309>: DATABASE ENTRY DATE: 1995-01-06
APMTQTTPLKTSWVNCSNMIDEIITHLKQPPLPLLDFNNLNGEDQDILMENNLRRPNLEAFNRAVKSLQNASAIESILKNLLPCLPLATAAPTRHPIHIKDGDWNEFRRKLTFYLKTLENAQAQQTTLSLAIF

SEQ ID NO: 206 - protein, 141 aa, Homo sapiens
  ref <308>: DATABASE ACCESSION NUMBER: Genbank AAA85480
  ref <309>: DATABASE ENTRY DATE: 1996-01-19
EGICRNRVTNNVKDVTKLVANLPKDYMITLKYVPGMDVLPSHCWISEMVVQLSDSLTDLLDKFSNISEGLSNYSIIDKLVNIVDDLVECVKENSSKDLKKSFKSPEPRLFTPEEFFRIFNRSIDAFKDFVVASETSDCVVS

SEQ ID NO: 207 - protein, 129 aa, Homo sapiens [sequence omitted]

SEQ ID NO: 208 - protein, 115 aa, Homo sapiens
  ref <308>: DATABASE ACCESSION NUMBER: Genbank CAA28390
  ref <309>: DATABASE ENTRY DATE: 1995-03-21
IPTEIPTSALVKETLALLSTHRTLLIANETLRIPVPVHKNHQLCTEEIFQGIGTLESQTVQGGTVERLFKNLSLIKKYIDGQKKKCGEERRRVNQFLDYLQEFLGVMNTEWIIES

SEQ ID NO: 209 - protein, 112 aa, Homo sapiens
  ref <308>: DATABASE ACCESSION NUMBER: Genbank NP_002179
  ref <309>: DATABASE ENTRY DATE: 2000-10-31
GPVPPSTALRELIEELVNITQNQKAPLCNGSMVWSINLTAGMYCAALESLINVSGCSAIEKTQRMLSGFCPHKVSAGQFSSLHVRDTKIEVAQFVKDLLLHLKKLFREGRFN

SEQ ID NO: 210 - protein, 177 aa, Homo sapiens
  ref <308>: DATABASE ACCESSION NUMBER: Genbank CAA27168
  ref <309>: DATABASE ENTRY DATE: 1995-03-21
TPLGPASSLPQSFLLKCLEQVRKIQGDGAALQEKLVSECATYKLCHPEELVLLGHSLGIPWAPLSSCPSQALQLAGCLSQLHSGLFLYQGLLQALEGISPELGPTLDTLQLDVADFATTIWQQMEELGMAPALQPTQGAMPAFASAFQRRAGGVLVASHLQSFLEVSYRVLRHLAQP

SEQ ID NO: 211 - protein, 146 aa, Homo sapiens
  ref <308>: DATABASE ACCESSION NUMBER: Genbank AAA60470
  ref <309>: DATABASE ENTRY DATE: 1995-01-13
VPIQKVQDDTKTLIKTIVTRINDISHTQSVSSKQKVTGLDFIPGLHPILTLSKMDQTLAVYQQILTSMPSRNVIQISNDLENLRDLLHVLAFSKSCHLPWASGLETLDSLGGVLEASGYSTEVVALSRLQGSLQDMLWQLDLSPGC

SEQ ID NO: 212 - protein, 200 aa, Homo sapiens
  ref <308>: DATABASE ACCESSION NUMBER: Genbank NP_000605
  ref <309>: DATABASE ENTRY DATE: 2002-07-17
MAFTEHSPLTPHRRDLCSRSIWLARKIRSDLTALTESYVKHQGLNKNINLDSADGMPVASTDQWSELTEAERLQENLQAYRTFHVLLARLLEDQQVHFTPTEGDFHQAIHTLLLQVAAFAYQIEELMILLEYKIPRNEADGMPINVGDGGLFEKKLWGLKVLQELSQWTVRSIHDLRFISSHQTGIPARGSHYIANNKKM

SEQ ID NO: 213 - protein, 180 aa, Homo sapiens
  ref <308>: DATABASE ACCESSION NUMBER: Genbank CAA32147
  ref <309>: DATABASE ENTRY DATE: 1995-03-22
SPLPITPVNATCAIRHPCHNNLMNQIRSQLAQLNGSANALFILYYTAQGEPFPNNLDKLCGPNVTDFPPFHANGTEKAKLVELYRIVVYLGTSLGNITRDQKILNPSALSLHSKLNATADILRGLLSNVLCRLCSKYHVGHVDVTYGPDTSGKDVFQKKKLGCQLLGKYKQIIAVLAQAF

SEQ ID NO: 214 - protein, 227 aa, Homo sapiens
  ref <308>: DATABASE ACCESSION NUMBER: Genbank AAA36388
  ref <309>: DATABASE ENTRY DATE: 1993-04-27
AAIGSCSKEYRVLLGQLQKQTDLMQDTSRLLDPYIRIQGLDVPKLREHCRERPGAFPSEETLRGLGRRGFLQTLNATLGCVLHRLADLEQRLPKAQDLERSGLNIEDLEKLQMARPNILGLRNNIYCMAQLLDNSDTAEPTKAGRGASQPPTPTPASDAFQRKLEGCRFLHGYHRFMHSVGRVFSKWGESPNRSRRHSPHQALRKGVRRTRPSRKGKRLMTRGQLPR

SEQ ID NO: 215 - protein, 197 aa, Homo sapiens
  ref <308>: DATABASE ACCESSION NUMBER: Genbank AF101062
  ref <309>: DATABASE ENTRY DATE: 1999-03-03
RNLPVATPDPGMFPCLHHSQNLLRAVSNMLQKARQTLEFYPCTSEEIDHEDITKDKTSTVEACLPLELTKNESCLNSRETSFITNGSCLASRKTSFMMALCLSSIYEDLKMYQVEFKTMNAKLLMDPKRQIFLDQNMLAVIDELMQALNFNSETVPQKSSLEEPDFYKTKIKLCILLHAFRIRAVTIDRVMSYLNAS

SEQ ID NO: 216 - protein, 191 aa, Homo sapiens
FPTIPLSRLFDNAMLRARRLYQLAYDTYQEFEEAYILKEQKYSFLQNPQTSLCFSESIPTPSNREETQQKSNLELLRISLLLIQSWLEPVQFLRSVFANSLVYGASDSNVYDLLKDLEEGIQTLMGRLEDGSPRTGQIFKQTYSKFDTNSHNDDALLKNYGLLYCFRKDMDKVETFLRIVQCRSVEGSCGF

SEQ ID NO: 217 - protein, 183 aa, Homo sapiens; identical to SEQ ID NO: 198
  ref <308>: DATABASE ACCESSION NUMBER: Genbank AAD13886
  ref <309>: DATABASE ENTRY DATE: 1993-06-28

SEQ ID NO: 218 - DNA, 55 bp, Artificial Sequence
  EcoRI Forward Primer
gcctgtatgatttattggatgttggaattccctgatgcggtattttctccttacg

SEQ ID NO: 219 - DNA, 55 bp, Artificial Sequence
  EcoRI Reverse Primer
cgtaaggagaaaataccgcatcagggaattccaacatccaataaatcatacaggc

SEQ ID NO: 220 - DNA, 35 bp, Artificial Sequence
  Seq ClaI Forward Primer
ctgattatcaaccgcggtacatatgattgacatgc

SEQ ID NO: 221 - DNA, 31 bp, Artificial Sequence
  Seq ClaI Reverse Primer
tacgggataataccgcgccacatagcagaac

SEQ ID NO: 222 - DNA, 18 bp, Artificial Sequence
  Seq Forward Primer
cctgatgaaggaggactc

SEQ ID NO: 223 - DNA, 18 bp, Artificial Sequence
  Seq Reverse Primer
ccaagcagcagatgagtc

SEQ ID NO: 224 - DNA, 31 bp, Artificial Sequence
  IFN alpha-2b 5' Primer
tcagctgcaagtcaagctgctctgtgggctg

SEQ ID NO: 225 - DNA, 48 bp, Artificial Sequence
  IFN alpha-2b 3' Primer
gctctagatcattccttacttcttaaactttcttgcaagtttgttgac

SEQ ID NO: 226 - DNA, 36 bp, Artificial Sequence
  IFN alpha-2b HindIII Primer
cccaagcttatggccttgacctttgctttactggtg

SEQ ID NO: 227 - DNA, 48 bp, Artificial Sequence; identical to SEQ ID NO: 225
  IFN alpha-2b XbaI Primer

SEQ ID NO: 228 - DNA, 80 bp, Artificial Sequence
  IFN alpha-2b 80 bp 5' Primer
cccaagcttatggccttgacctttgctttactggtggccctcctggtgctcagctgcaagtcaagctgctctgtgggctg

SEQ ID NO: 229 - DNA, 20 bp, Artificial Sequence
  EMCV Forward Primer
cccctacattgaggcatcca

SEQ ID NO: 230 - DNA, 21 bp, Artificial Sequence
  EMCV Reverse Primer
caggagcaggacaaggtcact

SEQ ID NO: 231 - DNA, 22 bp, Artificial Sequence
  misc_feature 1; 22: EMCV Probe: n at position 1 is a 5-carboxyfluorescein (FAM)-modified deoxycytidylate; n at position 22 is an N,N,N',N'-tetramethyl-6-carboxyrhodamine (TAMRA)-modified deoxythymidylate.
nagccgtcaagacccaaccgcn

SEQ ID NO: 232 - protein, 165 aa, Artificial Sequence
  Interferon alpha consensus sequence
CDLPQTHSLGNRRALILLAQMRRISPFSCLKDRHDFGPQEEFDGNQFQKAQAISVLHEMIQQTFNLFSTKDSSAAWDESLLEKFYTELYQQLNDLEACVIQEVGVEETPLMNVDSILAVKKYFQRITLYLTEKKYSPCAWEVVRAEIMRSFSLSTNLQERLRRKE

SEQ ID NO: 233 - protein, 166 aa, Homo sapiens
MSYNLLGFLQRSSNFQCQKLLWQLNGRLEYCLKDRMNFQIPEEIKQLQQFQKEDAALTIYEMLQNIFAIFRQDSSSTGWNETIVENLLANVYHQINHLKTVLEEKLEKEDFTRGKLMSSLHLKRYYGRILHYLKAKEYSHCAWTIVRVEILRNFYFINRLTGYLRN

SEQ ID NO: 234 - protein, 166 aa, Homo sapiens; identical to SEQ ID NO: 233

SEQ ID NO: 235 - protein, 166 aa, Homo sapiens
MSYNLLGFLQRSSNFQCQKLLWQLNGRLEYCLKDRMNFHIPEEIKQLQQFQKEDAALTIYEMLQNIFAIFRQDSSSTGWNETIVENLLANVYHQINHLKTVLEEKLEKEDFTRGKLMSSLHLKRYYGRILHYLKAKEYSHCAWTIVRVEILRNFYFINRLTGYLRN

SEQ ID NO: 236 - protein, 166 aa, Homo sapiens
MSYNLLGFLQRSSNFQCQKLLWQLNGRLEYCLKDRMNFGIPEEIKQLQQFQKEDAALTIYEMLQNIFAIFRQDSSSTGWNETIVENLLANVYHQINHLKTVLEEKLEKEDFTRGKLMSSLHLKRYYGRILHYLKAKEYSHCAWTIVRVEILRNFYFINRLTGYLRN

SEQ ID NO: 237 - protein, 166 aa, Homo sapiens
MSYNLLGFLQRSSNFQCQKLLWQLNGRLEYCLKDRMNFDIPQEIKQLQQFQKEDAALTIYEMLQNIFAIFRQDSSSTGWNETIVENLLANVYHQINHLKTVLEEKLEKEDFTRGKLMSSLHLKRYYGRILHYLKAKEYSHCAWTIVRVEILRNFYFINRLTGYLRN

SEQ ID NO: 238 - protein, 166 aa, Homo sapiens
MSYNLLGFLQRSSNFQCQKLLWQLNGRLEYCLKDRMNFDIPHEIKQLQQFQKEDAALTIYEMLQNIFAIFRQDSSSTGWNETIVENLLANVYHQINHLKTVLEEKLEKEDFTRGKLMSSLHLKRYYGRILHYLKAKEYSHCAWTIVRVEILRNFYFINRLTGYLRN

SEQ ID NO: 239 - protein, 166 aa, Homo sapiens
MSYNLLGFLQRSSNFQCQKLLWQLNGRLEYCLKDRMNFDIPEEIQQLQQFQKEDAALTIYEMLQNIFAIFRQDSSSTGWNETIVENLLANVYHQINHLKTVLEEKLEKEDFTRGKLMSSLHLKRYYGRILHYLKAKEYSHCAWTIVRVEILRNFYFINRLTGYLRN

SEQ ID NO: 240 - protein, 166 aa, Homo sapiens
MSYNLLGFLQRSSNFQCQKLLWQLNGRLEYCLKDRMNFDIPEEITQLQQFQKEDAALTIYEMLQNIFAIFRQDSSSTGWNETIVENLLANVYHQINHLKTVLEEKLEKEDFTRGKLMSSLHLKRYYGRILHYLKAKEYSHCAWTIVRVEILRNFYFINRLTGYLRN

SEQ ID NO: 241 - protein, 166 aa, Homo sapiens
MSYNLLGFLQRSSNFQCQKLLWQLNGRLEYCLKDRMNFDIPEEISQLQQFQKEDAALTIYEMLQNIFAIFRQDSSSTGWNETIVENLLANVYHQINHLKTVLEEKLEKEDFTRGKLMSSLHLKRYYGRILHYLKAKEYSHCAWTIVRVEILRNFYFINRLTGYLRN

SEQ ID NO: 242 - protein, 166 aa, Homo sapiens
MSYNLLGFLQRSSNFQCQKLLWQLNGRLEYCLKDRMNFDIPEEIHQLQQFQKEDAALTIYEMLQNIFAIFRQDSSSTGWNETIVENLLANVYHQINHLKTVLEEKLEKEDFTRGKLMSSLHLKRYYGRILHYLKAKEYSHCAWTIVRVEILRNFYFINRLTGYLRN

SEQ ID NO: 243 - protein, 166 aa, Homo sapiens
MSYNLLGFLQRSSNFQCQKLLWQLNGRLEYCLKDRMNFDIPEEIKQVQQFQKEDAALTIYEMLQNIFAIFRQDSSSTGWNETIVENLLANVYHQINHLKTVLEEKLEKEDFTRGKLMSSLHLKRYYGRILHYLKAKEYSHCAWTIVRVEILRNFYFINRLTGYLRN

SEQ ID NO: 244 - protein, 166 aa, Homo sapiens
MSYNLLGFLQRSSNFQCQKLLWQLNGRLEYCLKDRMNFDIPEEIKQIQQFQKEDAALTIYEMLQNIFAIFRQDSSSTGWNETIVENLLANVYHQINHLKTVLEEKLEKEDFTRGKLMSSLHLKRYYGRILHYLKAKEYSHCAWTIVRVEILRNFYFINRLTGYLRN

SEQ ID NO: 245 - protein, 166 aa, Homo sapiens
MSYNLLGFLQRSSNFQCQKLLWQLNGRLEYCLKDRMNFDIPEEIKQTQQFQKEDAALTIYEMLQNIFAIFRQDSSSTGWNETIVENLLANVYHQINHLKTVLEEKLEKEDFTRGKLMSSLHLKRYYGRILHYLKAKEYSHCAWTIVRVEILRNFYFINRLTGYLRN

SEQ ID NO: 246 - protein, 166 aa, Homo sapiens
MSYNLLGFLQRSSNFQCQKLLWQLNGRLEYCLKDRMNFDIPEEIKQQQQFQKEDAALTIYEMLQNIFAIFRQDSSSTGWNETIVENLLANVYHQINHLKTVLEEKLEKEDFTRGKLMSSLHLKRYYGRILHYLKAKEYSHCAWTIVRVEILRNFYFINRLTGYLRN

SEQ ID NO: 247 - protein, 166 aa, Homo sapiens
MSYNLLGFLQRSSNFQCQKLLWQLNGRLEYCLKDRMNFDIPEEIKQHQQFQKEDAALTIYEMLQNIFAIFRQDSSSTGWNETIVENLLANVYHQINHLKTVLEEKLEKEDFTRGKLMSSLHLKRYYGRILHYLKAKEYSHCAWTIVRVEILRNFYFINRLTGYLRN

SEQ ID NO: 248 - protein, 166 aa, Homo sapiens
MSYNLLGFLQRSSNFQCQKLLWQLNGRLEYCLKDRMNFDIPEEIKQAQQFQKEDAALTIYEMLQNIFAIFRQDSSSTGWNETIVENLLANVYHQINHLKTVLEEKLEKEDFTRGKLMSSLHLKRYYGRILHYLKAKEYSHCAWTIVRVEILRNFYFINRLTGYLRN

SEQ ID NO: 249 - protein, 166 aa, Homo sapiens
MSYNLLGFLQRSSNFQCQKLLWQLNGRLEYCLKDRMNFDIPEEIKQLQQFQQEDAALTIYEMLQNIFAIFRQDSSSTGWNETIVENLLANVYHQINHLKTVLEEKLEKEDFTRGKLMSSLHLKRYYGRILHYLKAKEYSHCAWTIVRVEILRNFYFINRLTGYLRN

SEQ ID NO: 250 - protein, 166 aa, Homo sapiens
MSYNLLGFLQRSSNFQCQKLLWQLNGRLEYCLKDRMNFDIPEEIKQLQQFQTEDAALTIYEMLQNIFAIFRQDSSSTGWNETIVENLLANVYHQINHLKTVLEEKLEKEDFTRGKLMSSLHLKRYYGRILHYLKAKEYSHCAWTIVRVEILRNFYFINRLTGYLRN

SEQ ID NO: 251 - protein, 166 aa, Homo sapiens
MSYNLLGFLQRSSNFQCQKLLWQLNGRLEYCLKDRMNFDIPEEIKQLQQFQSEDAALTIYEMLQNIFAIFRQDSSSTGWNETIVENLLANVYHQINHLKTVLEEKLEKEDFTRGKLMSSLHLKRYYGRILHYLKAKEYSHCAWTIVRVEILRNFYFINRLTGYLRN

SEQ ID NO: 252 - protein, 166 aa, Homo sapiens
MSYNLLGFLQRSSNFQCQKLLWQLNGRLEYCLKDRMNFDIPEEIKQLQQFQHEDAALTIYEMLQNIFAIFRQDSSSTGWNETIVENLLANVYHQINHLKTVLEEKLEKEDFTRGKLMSSLHLKRYYGRILHYLKAKEYSHCAWTIVRVEILRNFYFINRLTGYLRN

SEQ ID NO: 253 - protein, 166 aa, Homo sapiens
MSYNLLGFLQRSSNFQCQKLLWQLNGRLEYCLKDRMNFDIPEEIKQLQQFQKEDAALTIYEMLQNIIAIFRQDSSSTGWNETIVENLLANVYHQINHLKTVLEEKLEKEDFTRGKLMSSLHLKRYYGRILHYLKAKEYSHCAWTIVRVEILRNFYFINRLTGYLRN

SEQ ID NO: 254 - protein, 166 aa, Homo sapiens
MSYNLLGFLQRSSNFQCQKLLWQLNGRLEYCLKDRMNFDIPEEIKQLQQFQKEDAALTIYEMLQNIVAIFRQDSSSTGWNETIVENLLANVYHQINHLKTVLEEKLEKEDFTRGKLMSSLHLKRYYGRILHYLKAKEYSHCAWTIVRVEILRNFYFINRLTGYLRN

SEQ ID NO: 255 - protein, 166 aa, Homo sapiens
MSYNLLGFLQRSSNFQCQKLLWQLNGRLEYCLKDRMNFDIPEEIKQLQQFQKEDAALTIYEMLQNIFAIFHQDSSSTGWNETIVENLLANVYHQINHLKTVLEEKLEKEDFTRGKLMSSLHLKRYYGRILHYLKAKEYSHCAWTIVRVEILRNFYFINRLTGYLRN

SEQ ID NO: 256 - protein, 166 aa, Homo sapiens
MSYNLLGFLQRSSNFQCQKLLWQLNGRLEYCLKDRMNFDIPEEIKQLQQFQKEDAALTIYEMLQNIFAIFQQDSSSTGWNETIVENLLANVYHQINHLKTVLEEKLEKEDFTRGKLMSSLHLKRYYGRILHYLKAKEYSHCAWTIVRVEILRNFYFINRLTGYLRN

SEQ ID NO: 257 - protein, 166 aa, Homo sapiens
MSYNLLGFLQRSSNFQCQKLLWQLNGRLEYCLKDRMNFDIPEEIKQLQQFQKEDAALTIYEMLQNIFAIFRQQSSSTGWNETIVENLLANVYHQINHLKTVLEEKLEKEDFTRGKLMSSLHLKRYYGRILHYLKAKEYSHCAWTIVRVEILRNFYFINRLTGYLRN

SEQ ID NO: 258 - protein, 166 aa, Homo sapiens
MSYNLLGFLQRSSNFQCQKLLWQLNGRLEYCLKDRMNFDIPEEIKQLQQFQKEDAALTIYEMLQNIFAIFRQHSSSTGWNETIVENLLANVYHQINHLKTVLEEKLEKEDFTRGKLMSSLHLKRYYGRILHYLKAKEYSHCAWTIVRVEILRNFYFINRLTGYLRN

SEQ ID NO: 259 - protein, 166 aa, Homo sapiens
MSYNLLGFLQRSSNFQCQKLLWQLNGRLEYCLKDRMNFDIPEEIKQLQQFQKEDAALTIYEMLQNIFAIFRQGSSSTGWNETIVENLLANVYHQINHLKTVLEEKLEKEDFTRGKLMSSLHLKRYYGRILHYLKAKEYSHCAWTIVRVEILRNFYFINRLTGYLRN

SEQ ID NO: 260 - protein, 166 aa, Homo sapiens
MSYNLLGFLQRSSNFQCQKLLWQLNGRLEYCLKDRMNFDIPEEIKQLQQFQKEDAALTIYEMLQNIFAIFRQDSSSTGWNQTIVENLLANVYHQINHLKTVLEEKLEKEDFTRGKLMSSLHLKRYYGRILHYLKAKEYSHCAWTIVRVEILRNFYFINRLTGYLRN

SEQ ID NO: 261 - protein, 166 aa, Homo sapiens
MSYNLLGFLQRSSNFQCQKLLWQLNGRLEYCLKDRMNFDIPEEIKQLQQFQKEDAALTIYEMLQNIFAIFRQDSSSTGWNHTIVENLLANVYHQINHLKTVLEEKLEKEDFTRGKLMSSLHLKRYYGRILHYLKAKEYSHCAWTIVRVEILRNFYFINRLTGYLRN

SEQ ID NO: 262 - protein, 166 aa, Homo sapiens
MSYNLLGFLQRSSNFQCQKLLWQLNGRLEYCLKDRMNFDIPEEIKQLQQFQKEDAALTIYEMLQNIFAIFRQDSSSTGWNETIVENLLANVYHQINHLKTVLEEKLQKEDFTRGKLMSSLHLKRYYGRILHYLKAKEYSHCAWTIVRVEILRNFYFINRLTGYLRN

SEQ ID NO: 263 - protein, 166 aa, Homo sapiens
MSYNLLGFLQRSSNFQCQKLLWQLNGRLEYCLKDRMNFDIPEEIKQLQQFQKEDAALTIYEMLQNIFAIFRQDSSSTGWNETIVENLLANVYHQINHLKTVLEEKLHKEDFTRGKLMSSLHLKRYYGRILHYLKAKEYSHCAWTIVRVEILRNFYFINRLTGYLRN

SEQ ID NO: 264 - protein, 166 aa, Homo sapiens
MSYNLLGFLQRSSNFQCQKLLWQLNGRLEYCLKDRMNFDIPEEIKQLQQFQKEDAALTIYEMLQNIFAIFRQDSSSTGWNETIVENLLANVYHQINHLKTVLEEKLEQEDFTRGKLMSSLHLKRYYGRILHYLKAKEYSHCAWTIVRVEILRNFYFINRLTGYLRN

SEQ ID NO: 265 - protein, 166 aa, Homo sapiens
MSYNLLGFLQRSSNFQCQKLLWQLNGRLEYCLKDRMNFDIPEEIKQLQQFQKEDAALTIYEMLQNIFAIFRQDSSSTGWNETIVENLLANVYHQINHLKTVLEEKLETEDFTRGKLMSSLHLKRYYGRILHYLKAKEYSHCAWTIVRVEILRNFYFINRLTGYLRN

SEQ ID NO: 266 - protein, 166 aa, Homo sapiens
MSYNLLGFLQRSSNFQCQKLLWQLNGRLEYCLKDRMNFDIPEEIKQLQQFQKEDAALTIYEMLQNIFAIFRQDSSSTGWNETIVENLLANVYHQINHLKTVLEEKLESEDFTRGKLMSSLHLKRYYGRILHYLKAKEYSHCAWTIVRVEILRNFYFINRLTGYLRN

SEQ ID NO: 267 - protein, 166 aa, Homo sapiens
MSYNLLGFLQRSSNFQCQKLLWQLNGRLEYCLKDRMNFDIPEEIKQLQQFQKEDAALTIYEMLQNIFAIFRQDSSSTGWNETIVENLLANVYHQINHLKTVLEEKLEHEDFTRGKLMSSLHLKRYYGRILHYLKAKEYSHCAWTIVRVEILRNFYFINRLTGYLRN

SEQ ID NO: 268 - protein, 166 aa, Homo sapiens
MSYNLLGFLQRSSNFQCQKLLWQLNGRLEYCLKDRMNFDIPEEIKQLQQFQKEDAALTIYEMLQNIFAIFRQDSSSTGWNETIVENLLANVYHQINHLKTVLEEKLEKQDFTRGKLMSSLHLKRYYGRILHYLKAKEYSHCAWTIVRVEILRNFYFINRLTGYLRN

SEQ ID NO: 269 - protein, 166 aa, Homo sapiens
MSYNLLGFLQRSSNFQCQKLLWQLNGRLEYCLKDRMNFDIPEEIKQLQQFQKEDAALTIYEMLQNIFAIFRQDSSSTGWNETIVENLLANVYHQINHLKTVLEEKLEKHDFTRGKLMSSLHLKRYYGRILHYLKAKEYSHCAWTIVRVEILRNFYFINRLTGYLRN

SEQ ID NO: 270 - protein, 166 aa, Homo sapiens
MSYNLLGFLQRSSNFQCQKLLWQLNGRLEYCLKDRMNFDIPEEIKQLQQFQKEDAALTIYEMLQNIFAIFRQDSSSTGWNETIVENLLANVYHQINHLKTVLEEKLEKEQFTRGKLMSSLHLKRYYGRILHYLKAKEYSHCAWTIVRVEILRNFYFINRLTGYLRN

SEQ ID NO: 271 - protein, 166 aa, Homo sapiens
MSYNLLGFLQRSSNFQCQKLLWQLNGRLEYCLKDRMNFDIPEEIKQLQQFQKEDAALTIYEMLQNIFAIFRQDSSSTGWNETIVENLLANVYHQINHLKTVLEEKLEKEHFTRGKLMSSLHLKRYYGRILHYLKAKEYSHCAWTIVRVEILRNFYFINRLTGYLRN

SEQ ID NO: 272 - protein, 166 aa, Homo sapiens
MSYNLLGFLQRSSNFQCQKLLWQLNGRLEYCLKDRMNFDIPEEIKQLQQFQKEDAALTIYEMLQNIFAIFRQDSSSTGWNETIVENLLANVYHQINHLKTVLEEKLEKEGFTRGKLMSSLHLKRYYGRILHYLKAKEYSHCAWTIVRVEILRNFYFINRLTGYLRN

SEQ ID NO: 273 - protein, 166 aa, Homo sapiens
MSYNLLGFLQRSSNFQCQKLLWQLNGRLEYCLKDRMNFDIPEEIKQLQQFQKEDAALTIYEMLQNIFAIFRQDSSSTGWNETIVENLLANVYHQINHLKTVLEEKLEKEDITRGKLMSSLHLKRYYGRILHYLKAKEYSHCAWTIVRVEILRNFYFINRLTGYLRN

SEQ ID NO: 274 - protein, 166 aa, Homo sapiens
MSYNLLGFLQRSSNFQCQKLLWQLNGRLEYCLKDRMNFDIPEEIKQLQQFQKEDAALTIYEMLQNIFAIFRQDSSSTGWNETIVENLLANVYHQINHLKTVLEEKLEKEDVTRGKLMSSLHLKRYYGRILHYLKAKEYSHCAWTIVRVEILRNFYFINRLTGYLRN

SEQ ID NO: 275 - protein, 166 aa, Homo sapiens
MSYNLLGFLQRSSNFQCQKLLWQLNGRLEYCLKDRMNFDIPEEIKQLQQFQKEDAALTIYEMLQNIFAIFRQDSSSTGWNETIVENLLANVYHQINHLKTVLEEKLEKEDFTHGKLMSSLHLKRYYGRILHYLKAKEYSHCAWTIVRVEILRNFYFINRLTGYLRN

SEQ ID NO: 276 - protein, 166 aa, Homo sapiens
MSYNLLGFLQRSSNFQCQKLLWQLNGRLEYCLKDRMNFDIPEEIKQLQQFQKEDAALTIYEMLQNIFAIFRQDSSSTGWNETIVENLLANVYHQINHLKTVLEEKLEKEDFTQGKLMSSLHLKRYYGRILHYLKAKEYSHCAWTIVRVEILRNFYFINRLTGYLRN

SEQ ID NO: 277 - protein, 166 aa, Homo sapiens
MSYNLLGFLQRSSNFQCQKLLWQLNGRLEYCLKDRMNFDIPEEIKQLQQFQKEDAALTIYEMLQNIFAIFRQDSSSTGWNETIVENLLANVYHQINHLKTVLEEKLEKEDFTRGKVMSSLHLKRYYGRILHYLKAKEYSHCAWTIVRVEILRNFYFINRLTGYLRN

SEQ ID NO: 278 - protein, 166 aa, Homo sapiens
MSYNLLGFLQRSSNFQCQKLLWQLNGRLEYCLKDRMNFDIPEEIKQLQQFQKEDAALTIYEMLQNIFAIFRQDSSSTGWNETIVENLLANVYHQINHLKTVLEEKLEKEDFTRGKIMSSLHLKRYYGRILHYLKAKEYSHCAWTIVRVEILRNFYFINRLTGYLRN

SEQ ID NO: 279 - protein, 166 aa, Homo sapiens
MSYNLLGFLQRSSNFQCQKLLWQLNGRLEYCLKDRMNFDIPEEIKQLQQFQKEDAALTIYEMLQNIFAIFRQDSSSTGWNETIVENLLANVYHQINHLKTVLEEKLEKEDFTRGKTMSSLHLKRYYGRILHYLKAKEYSHCAWTIVRVEILRNFYFINRLTGYLRN

SEQ ID NO: 280 - protein, 166 aa, Homo sapiens
MSYNLLGFLQRSSNFQCQKLLWQLNGRLEYCLKDRMNFDIPEEIKQLQQFQKEDAALTIYEMLQNIFAIFRQDSSSTGWNETIVENLLANVYHQINHLKTVLEEKLEKEDFTRGKQMSSLHLKRYYGRILHYLKAKEYSHCAWTIVRVEILRNFYFINRLTGYLRN

SEQ ID NO: 281 - protein, 166 aa, Homo sapiens
MSYNLLGFLQRSSNFQCQKLLWQLNGRLEYCLKDRMNFDIPEEIKQLQQFQKEDAALTIYEMLQNIFAIFRQDSSSTGWNETIVENLLANVYHQINHLKTVLEEKLEKEDFTRGKHMSSLHLKRYYGRILHYLKAKEYSHCAWTIVRVEILRNFYFINRLTGYLRN

SEQ ID NO: 282 - protein, 166 aa, Homo sapiens
MSYNLLGFLQRSSNFQCQKLLWQLNGRLEYCLKDRMNFDIPEEIKQLQQFQKEDAALTIYEMLQNIFAIFRQDSSSTGWNETIVENLLANVYHQINHLKTVLEEKLEKEDFTRGKAMSSLHLKRYYGRILHYLKAKEYSHCAWTIVRVEILRNFYFINRLTGYLRN

SEQ ID NO: 283 - protein, 166 aa, Homo sapiens
MSYNLLGFLQRSSNFQCQKLLWQLNGRLEYCLKDRMNFDIPEEIKQLQQFQKEDAALTIYEMLQNIFAIFRQDSSSTGWNETIVENLLANVYHQINHLKTVLEEKLEKEDFTRGKLMSSVHLKRYYGRILHYLKAKEYSHCAWTIVRVEILRNFYFINRLTGYLRN

SEQ ID NO: 284 - protein, 166 aa, Homo sapiens
MSYNLLGFLQRSSNFQCQKLLWQLNGRLEYCLKDRMNFDIPEEIKQLQQFQKEDAALTIYEMLQNIFAIFRQDSSSTGWNETIVENLLANVYHQINHLKTVLEEKLEKEDFTRGKLMSSIHLKRYYGRILHYLKAKEYSHCAWTIVRVEILRNFYFINRLTGYLRN

SEQ ID NO: 285 - protein, 166 aa, Homo sapiens
MSYNLLGFLQRSSNFQCQKLLWQLNGRLEYCLKDRMNFDIPEEIKQLQQFQKEDAALTIYEMLQNIFAIFRQDSSSTGWNETIVENLLANVYHQINHLKTVLEEKLEKEDFTRGKLMSSTHLKRYYGRILHYLKAKEYSHCAWTIVRVEILRNFYFINRLTGYLRN

SEQ ID NO: 286 - protein, 166 aa, Homo sapiens
MSYNLLGFLQRSSNFQCQKLLWQLNGRLEYCLKDRMNFDIPEEIKQLQQFQKEDAALTIYEMLQNIFAIFRQDSSSTGWNETIVENLLANVYHQINHLKTVLEEKLEKEDFTRGKLMSSQHLKRYYGRILHYLKAKEYSHCAWTIVRVEILRNFYFINRLTGYLRN

SEQ ID NO: 287 - protein, 166 aa, Homo sapiens
MSYNLLGFLQRSSNFQCQKLLWQLNGRLEYCLKDRMNFDIPEEIKQLQQFQKEDAALTIYEMLQNIFAIFRQDSSSTGWNETIVENLLANVYHQINHLKTVLEEKLEKEDFTRGKLMSSHHLKRYYGRILHYLKAKEYSHCAWTIVRVEILRNFYFINRLTGYLRN

SEQ ID NO: 288 - protein, 166 aa, Homo sapiens
MSYNLLGFLQRSSNFQCQKLLWQLNGRLEYCLKDRMNFDIPEEIKQLQQFQKEDAALTIYEMLQNIFAIFRQDSSSTGWNETIVENLLANVYHQINHLKTVLEEKLEKEDFTRGKLMSSAHLKRYYGRILHYLKAKEYSHCAWTIVRVEILRNFYFINRLTGYLRN

SEQ ID NO: 289 - protein, 166 aa, Homo sapiens
MSYNLLGFLQRSSNFQCQKLLWQLNGRLEYCLKDRMNFDIPEEIKQLQQFQKEDAALTIYEMLQNIFAIFRQDSSSTGWNETIVENLLANVYHQINHLKTVLEEKLEKEDFTRGKLMSSLHLQRYYGRILHYLKAKEYSHCAWTIVRVEILRNFYFINRLTGYLRN

SEQ ID NO: 290 - protein, 100 aa, Homo sapiens
CYCQDPYVKEAENLKKYFNAGHSDVADNGTLFVGILKNWKEESDRKIMQSQIVSFYFKLFKNFKDDQSIQKSVETIKEDMNVKFFNSNKKKRDDFEKLTN

SEQ ID NO: 291 - protein, 100 aa, Homo sapiens
CYCQDPYVKEAENLKKYFNAGHSDVADNGTLFIGILKNWKEESDRKIMQSQIVSFYFKLFKNFKDDQSIQKSVETIKEDMNVKFFNSNKKKRDDFEKLTN

SEQ ID NO: 292 - protein, 100 aa, Homo sapiens
CYCQDPYVKEAENLKKYFNAGHSDVADNGTLFLGILQNWKEESDRKIMQSQIVSFYFKLFKNFKDDQSIQKSVETIKEDMNVKFFNSNKKKRDDFEKLTN

SEQ ID NO: 293 - protein, 100 aa, Homo sapiens
CYCQDPYVKEAENLKKYFNAGHSDVADNGTLFLGILNNWKEESDRKIMQSQIVSFYFKLFKNFKDDQSIQKSVETIKEDMNVKFFNSNKKKRDDFEKLTN

SEQ ID NO: 294 - protein, 100 aa, Homo sapiens
CYCQDPYVKEAENLKKYFNAGHSDVADNGTLFLGILKNWQEESDRKIMQSQIVSFYFKLFKNFKDDQSIQKSVETIKEDMNVKFFNSNKKKRDDFEKLTN

SEQ ID NO: 295 - protein, 100 aa, Homo sapiens
CYCQDPYVKEAENLKKYFNAGHSDVADNGTLFLGILKNWNEESDRKIMQSQIVSFYFKLFKNFKDDQSIQKSVETIKEDMNVKFFNSNKKKRDDFEKLTN

SEQ ID NO: 296 - protein, 100 aa, Homo sapiens
CYCQDPYVKEAENLKKYFNAGHSDVADNGTLFLGILKNWKQESDRKIMQSQIVSFYFKLFKNFKDDQSIQKSVETIKEDMNVKFFNSNKKKRDDFEKLTN

SEQ ID NO: 297 - protein, 100 aa, Homo sapiens
CYCQDPYVKEAENLKKYFNAGHSDVADNGTLFLGILKNWKNESDRKIMQSQIVSFYFKLFKNFKDDQSIQKSVETIKEDMNVKFFNSNKKKRDDFEKLTN

SEQ ID NO: 298 - protein, 100 aa, Homo sapiens
CYCQDPYVKEAENLKKYFNAGHSDVADNGTLFLGILKNWKHESDRKIMQSQIVSFYFKLFKNFKDDQSIQKSVETIKEDMNVKFFNSNKKKRDDFEKLTN

SEQ ID NO: 299 - protein, 100 aa, Homo sapiens
CYCQDPYVKEAENLKKYFNAGHSDVADNGTLFLGILKNWKEQSDRKIMQSQIVSFYFKLFKNFKDDQSIQKSVETIKEDMNVKFFNSNKKKRDDFEKLTN

SEQ ID NO: 300 - protein, 100 aa, Homo sapiens
CYCQDPYVKEAENLKKYFNAGHSDVADNGTLFLGILKNWKENSDRKIMQSQIVSFYFKLFKNFKDDQSIQKSVETIKEDMNVKFFNSNKKKRDDFEKLTN

SEQ ID NO: 301 - protein, 100 aa, Homo sapiens
CYCQDPYVKEAENLKKYFNAGHSDVADNGTLFLGILKNWKEHSDRKIMQSQIVSFYFKLFKNFKDDQSIQKSVETIKEDMNVKFFNSNKKKRDDFEKLTN

SEQ ID NO: 302 - protein, 100 aa, Homo sapiens
CYCQDPYVKEAENLKKYFNAGHSDVADNGTLFLGILKNWKEESDRKIMQSQIVSFYFQLFKNFKDDQSIQKSVETIKEDMNVKFFNSNKKKRDDFEKLTN

SEQ ID NO: 303 - protein, 100 aa, Homo sapiens
CYCQDPYVKEAENLKKYFNAGHSDVADNGTLFLGILKNWKEESDRKIMQSQIVSFYFNLFKNFKDDQSIQKSVETIKEDMNVKFFNSNKKKRDDFEKLTN

SEQ ID NO: 304 - protein, 100 aa, Homo sapiens
CYCQDPYVKEAENLKKYFNAGHSDVADNGTLFLGILKNWKEESDRKIMQSQIVSFYFKLFQNFKDDQSIQKSVETIKEDMNVKFFNSNKKKRDDFEKLTN

SEQ ID NO: 305 - protein, 100 aa, Homo sapiens
CYCQDPYVKEAENLKKYFNAGHSDVADNGTLFLGILKNWKEESDRKIMQSQIVSFYFKLFNNFKDDQSIQKSVETIKEDMNVKFFNSNKKKRDDFEKLTN

SEQ ID NO: 306 - protein, 100 aa, Homo sapiens
CYCQDPYVKEAENLKKYFNAGHSDVADNGTLFLGILKNWKEESDRKIMQSQIVSFYFKLFKNFQDDQSIQKSVETIKEDMNVKFFNSNKKKRDDFEKLTN

SEQ ID NO: 307 - protein, 100 aa, Homo sapiens
CYCQDPYVKEAENLKKYFNAGHSDVADNGTLFLGILKNWKEESDRKIMQSQIVSFYFKLFKNFNDDQSIQKSVETIKEDMNVKFFNSNKKKRDDFEKLTN

SEQ ID NO: 308 - protein, 100 aa, Homo sapiens
CYCQDPYVKEAENLKKYFNAGHSDVADNGTLFLGILKNWKEESDRKIMQSQIVSFYFKLFKNFKQDQSIQKSVETIKEDMNVKFFNSNKKKRDDFEKLTN

SEQ ID NO: 309 - protein, 100 aa, Homo sapiens
CYCQDPYVKEAENLKKYFNAGHSDVADNGTLFLGILKNWKEESDRKIMQSQIVSFYFKLFKNFKNDQSIQKSVETIKEDMNVKFFNSNKKKRDDFEKLTN

SEQ ID NO: 310 - protein, 100 aa, Homo sapiens
CYCQDPYVKEAENLKKYFNAGHSDVADNGTLFLGILKNWKEESDRKIMQSQIVSFYFKLFKNFKDQQSIQKSVETIKEDMNVKFFNSNKKKRDDFEKLTN

SEQ ID NO: 311 - protein, 100 aa, Homo sapiens
CYCQDPYVKEAENLKKYFNAGHSDVADNGTLFLGILKNWKEESDRKIMQSQIVSFYFKLFKNFKDNQSIQKSVETIKEDMNVKFFNSNKKKRDDFEKLTN

SEQ ID NO: 312 - protein, 100 aa, Homo sapiens
SPGQGTQSENSCTHFPGNLPNMLRDLRDAFSRVKTFFQMKDQLDNLLLQESLLEDFKGYLGCQALSEMIQFYLEEVMPQAENQDPDIKAHVNSLGENLKT

SEQ ID NO: 313 - protein, 100 aa, Homo sapiens
SPGQGTQSENSCTHFPGNLPNMLRDLRDAFSRVKTFFQMKDQLDNLLLNESLLEDFKGYLGCQALSEMIQFYLEEVMPQAENQDPDIKAHVNSLGENLKT

SEQ ID NO: 314 - protein, 100 aa, Homo sapiens
SPGQGTQSENSCTHFPGNLPNMLRDLRDAFSRVKTFFQMKDQLDNLLLKQSLLEDFKGYLGCQALSEMIQFYLEEVMPQAENQDPDIKAHVNSLGENLKT

SEQ ID NO: 315 - protein, 100 aa, Homo sapiens
SPGQGTQSENSCTHFPGNLPNMLRDLRDAFSRVKTFFQMKDQLDNLLLKNSLLEDFKGYLGCQALSEMIQFYLEEVMPQAENQDPDIKAHVNSLGENLKT

SEQ ID NO: 316 - protein, 100 aa, Homo sapiens
SPGQGTQSENSCTHFPGNLPNMLRDLRDAFSRVKTFFQMKDQLDNLLLKHSLLEDFKGYLGCQALSEMIQFYLEEVMPQAENQDPDIKAHVNSLGENLKT

SEQ ID NO: 317 - protein, 100 aa, Homo sapiens
SPGQGTQSENSCTHFPGNLPNMLRDLRDAFSRVKTFFQMKDQLDNLLLKESVLEDFKGYLGCQALSEMIQFYLEEVMPQAENQDPDIKAHVNSLGENLKT

SEQ ID NO: 318 - protein, 100 aa, Homo sapiens
SPGQGTQSENSCTHFPGNLPNMLRDLRDAFSRVKTFFQMKDQLDNLLLKESILEDFKGYLGCQALSEMIQFYLEEVMPQAENQDPDIKAHVNSLGENLKT

SEQ ID NO: 319 - protein, 100 aa, Homo sapiens
SPGQGTQSENSCTHFPGNLPNMLRDLRDAFSRVKTFFQMKDQLDNLLLKESLVEDFKGYLGCQALSEMIQFYLEEVMPQAENQDPDIKAHVNSLGENLKT

SEQ ID NO: 320 - protein, 100 aa, Homo sapiens
SPGQGTQSENSCTHFPGNLPNMLRDLRDAFSRVKTFFQMKDQLDNLLLKESLIEDFKGYLGCQALSEMIQFYLEEVMPQAENQDPDIKAHVNSLGENLKT

SEQ ID NO: 321 - protein, 100 aa, Homo sapiens
SPGQGTQSENSCTHFPGNLPNMLRDLRDAFSRVKTFFQMKDQLDNLLLKESLLQDFKGYLGCQALSEMIQFYLEEVMPQAENQDPDIKAHVNSLGENLKT

SEQ ID NO: 322 - protein, 100 aa, Homo sapiens
SPGQGTQSENSCTHFPGNLPNMLRDLRDAFSRVKTFFQMKDQLDNLLLKESLLNDFKGYLGCQALSEMIQFYLEEVMPQAENQDPDIKAHVNSLGENLKT

SEQ ID NO: 323 - protein, 100 aa, Homo sapiens
SPGQGTQSENSCTHFPGNLPNMLRDLRDAFSRVKTFFQMKDQLDNLLLKESLLHDFKGYLGCQALSEMIQFYLEEVMPQAENQDPDIKAHVNSLGENLKT

SEQ ID NO: 324 - protein, 100 aa, Homo sapiens
SPGQGTQSENSCTHFPGNLPNMLRDLRDAFSRVKTFFQMKDQLDNLLLKESLLEQFKGYLGCQALSEMIQFYLEEVMPQAENQDPDIKAHVNSLGENLKT

SEQ ID NO: 325 - protein, 100 aa, Homo sapiens
SPGQGTQSENSCTHFPGNLPNMLRDLRDAFSRVKTFFQMKDQLDNLLLKESLLENFKGYLGCQALSEMIQFYLEEVMPQAENQDPDIKAHVNSLGENLKT

SEQ ID NO: 326 - protein, 100 aa, Homo sapiens
SPGQGTQSENSCTHFPGNLPNMLRDLRDAFSRVKTFFQMKDQLDNLLLKESLLEDIKGYLGCQALSEMIQFYLEEVMPQAENQDPDIKAHVNSLGENLKT

SEQ ID NO: 327 - protein, 100 aa, Homo sapiens
SPGQGTQSENSCTHFPGNLPNMLRDLRDAFSRVKTFFQMKDQLDNLLLKESLLEDVKGYLGCQALSEMIQFYLEEVMPQAENQDPDIKAHVNSLGENLKT

SEQ ID NO: 328 - protein, 100 aa, Homo sapiens
SPGQGTQSENSCTHFPGNLPNMLRDLRDAFSRVKTFFQMKDQLDNLLLKESLLEDFQGYLGCQALSEMIQFYLEEVMPQAENQDPDIKAHVNSLGENLKT

SEQ ID NO: 329 - protein, 100 aa, Homo sapiens
SPGQGTQSENSCTHFPGNLPNMLRDLRDAFSRVKTFFQMKDQLDNLLLKESLLEDFNGYLGCQALSEMIQFYLEEVMPQAENQDPDIKAHVNSLGENLKT

SEQ ID NO: 330 - protein, 100 aa, Homo sapiens
SPGQGTQSENSCTHFPGNLPNMLRDLRDAFSRVKTFFQMKDQLDNLLLKESLLEDFKGHLGCQALSEMIQFYLEEVMPQAENQDPDIKAHVNSLGENLKT

SEQ ID NO: 331 - protein, 100 aa, Homo sapiens
SPGQGTQSENSCTHFPGNLPNMLRDLRDAFSRVKTFFQMKDQLDNLLLKESLLEDFKGILGCQALSEMIQFYLEEVMPQAENQDPDIKAHVNSLGENLKT

SEQ ID NO: 332 - protein, 100 aa, Homo sapiens
SPGQGTQSENSCTHFPGNLPNMLRDLRDAFSRVKTFFQMKDQLDNLLLKESLLEDFKGYVGCQALSEMIQFYLEEVMPQAENQDPDIKAHVNSLGENLKT

SEQ ID NO: 333 - protein, 100 aa, Homo sapiens
SPGQGTQSENSCTHFPGNLPNMLRDLRDAFSRVKTFFQMKDQLDNLLLKESLLEDFKGYIGCQALSEMIQFYLEEVMPQAENQDPDIKAHVNSLGENLKT

SEQ ID NO: 334 - protein, 100 aa, Homo sapiens
SPGQGTQSENSCTHFPGNLPNMLRDLRDAFSRVKTFFQMKDQLDNLLLKESLLEDFKGYLGCQALSQMIQFYLEEVMPQAENQDPDIKAHVNSLGENLKT

SEQ ID NO: 335 - protein, 100 aa, Homo sapiens
SPGQGTQSENSCTHFPGNLPNMLRDLRDAFSRVKTFFQMKDQLDNLLLKESLLEDFKGYLGCQALSNMIQFYLEEVMPQAENQDPDIKAHVNSLGENLKT

SEQ ID NO: 336 - protein, 100 aa, Homo sapiens
SPGQGTQSENSCTHFPGNLPNMLRDLRDAFSRVKTFFQMKDQLDNLLLKESLLEDFKGYLGCQALSHMIQFYLEEVMPQAENQDPDIKAHVNSLGENLKT

SEQ ID NO: 337 - protein, 100 aa, Homo sapiens
SPGQGTQSENSCTHFPGNLPNMLRDLRDAFSRVKTFFQMKDQLDNLLLKESLLEDFKGYLGCQALSEVIQFYLEEVMPQAENQDPDIKAHVNSLGENLKT

SEQ ID NO: 338 - protein, 100 aa, Homo sapiens
SPGQGTQSENSCTHFPGNLPNMLRDLRDAFSRVKTFFQMKDQLDNLLLKESLLEDFKGYLGCQALSEIIQFYLEEVMPQAENQDPDIKAHVNSLGENLKT

SEQ ID NO: 339 - protein, 100 aa, Homo sapiens
SPGQGTQSENSCTHFPGNLPNMLRDLRDAFSRVKTFFQMKDQLDNLLLKESLLEDFKGYLGCQALSEMIQIYLEEVMPQAENQDPDIKAHVNSLGENLKT

SEQ ID NO: 340 - protein, 100 aa, Homo sapiens
SPGQGTQSENSCTHFPGNLPNMLRDLRDAFSRVKTFFQMKDQLDNLLLKESLLEDFKGYLGCQALSEMIQVYLEEVMPQAENQDPDIKAHVNSLGENLKT

SEQ ID NO: 341 - protein, 100 aa, Homo sapiens
SPGQGTQSENSCTHFPGNLPNMLRDLRDAFSRVKTFFQMKDQLDNLLLKESLLEDFKGYLGCQALSEMIQFHLEEVMPQAENQDPDIKAHVNSLGENLKT

SEQ ID NO: 342 - protein, 100 aa, Homo sapiens
SPGQGTQSENSCTHFPGNLPNMLRDLRDAFSRVKTFFQMKDQLDNLLLKESLLEDFKGYLGCQALSEMIQFILEEVMPQAENQDPDIKAHVNSLGENLKT

SEQ ID NO: 343 - protein, 100 aa, Homo sapiens
SPGQGTQSENSCTHFPGNLPNMLRDLRDAFSRVKTFFQMKDQLDNLLLKESLLEDFKGYLGCQALSEMIQFYLQEVMPQAENQDPDIKAHVNSLGENLKT

SEQ ID NO: 344 - protein, 100 aa, Homo sapiens
SPGQGTQSENSCTHFPGNLPNMLRDLRDAFSRVKTFFQMKDQLDNLLLKESLLEDFKGYLGCQALSEMIQFYLNEVMPQAENQDPDIKAHVNSLGENLKT

SEQ ID NO: 345 - protein, 100 aa, Homo sapiens
SPGQGTQSENSCTHFPGNLPNMLRDLRDAFSRVKTFFQMKDQLDNLLLKESLLEDFKGYLGCQALSEMIQFYLHEVMPQAENQDPDIKAHVNSLGENLKT

SEQ ID NO: 346 - protein, 100 aa, Homo sapiens
SPGQGTQSENSCTHFPGNLPNMLRDLRDAFSRVKTFFQMKDQLDNLLLKESLLEDFKGYLGCQALSEMIQFYLEQVMPQAENQDPDIKAHVNSLGENLKT

SEQ ID NO: 347 - protein, 100 aa, Homo sapiens
SPGQGTQSENSCTHFPGNLPNMLRDLRDAFSRVKTFFQMKDQLDNLLLKESLLEDFKGYLGCQALSEMIQFYLENVMPQAENQDPDIKAHVNSLGENLKT

SEQ ID NO: 348 - protein, 100 aa, Homo sapiens
SPGQGTQSENSCTHFPGNLPNMLRDLRDAFSRVKTFFQMKDQLDNLLLKESLLEDFKGYLGCQALSEMIQFYLEHVMPQAENQDPDIKAHVNSLGENLKT

SEQ ID NO: 349 - protein, 100 aa, Homo sapiens
SPGQGTQSENSCTHFPGNLPNMLRDLRDAFSRVKTFFQMKDQLDNLLLKESLLEDFKGYLGCQALSEMIQFYLEEVMSQAENQDPDIKAHVNSLGENLKT

SEQ ID NO: 350 - protein, 100 aa, Homo sapiens
SPGQGTQSENSCTHFPGNLPNMLRDLRDAFSRVKTFFQMKDQLDNLLLKESLLEDFKGYLGCQALSEMIQFYLEEVMAQAENQDPDIKAHVNSLGENLKT

SEQ ID NO: 351 - protein, 100 aa, Homo sapiens
SPGQGTQSENSCTHFPGNLPNMLRDLRDAFSRVKTFFQMKDQLDNLLLKESLLEDFKGYLGCQALSEMIQFYLEEVMPQAQNQDPDIKAHVNSLGENLKT

SEQ ID NO: 352 - protein, 100 aa, Homo sapiens
SPGQGTQSENSCTHFPGNLPNMLRDLRDAFSRVKTFFQMKDQLDNLLLKESLLEDFKGYLGCQALSEMIQFYLEEVMPQANNQDPDIKAHVNSLGENLKT

SEQ ID NO: 353 - protein, 100 aa, Homo sapiens
SPGQGTQSENSCTHFPGNLPNMLRDLRDAFSRVKTFFQMKDQLDNLLLKESLLEDFKGYLGCQALSEMIQFYLEEVMPQAHNQDPDIKAHVNSLGENLKT

SEQ ID NO: 354 - protein, 100 aa, Homo sapiens
SPGQGTQSENSCTHFPGNLPNMLRDLRDAFSRVKTFFQMKDQLDNLLLKESLLEDFKGYLGCQALSEMIQFYLEEVMPQAENQQPDIKAHVNSLGENLKT

SEQ ID NO: 355 - protein, 100 aa, Homo sapiens
SPGQGTQSENSCTHFPGNLPNMLRDLRDAFSRVKTFFQMKDQLDNLLLKESLLEDFKGYLGCQALSEMIQFYLEEVMPQAENQNPDIKAHVNSLGENLKT

SEQ ID NO: 356 - protein, 100 aa, Homo sapiens
SPGQGTQSENSCTHFPGNLPNMLRDLRDAFSRVKTFFQMKDQLDNLLLKESLLEDFKGYLGCQALSEMIQFYLEEVMPQAENQDSDIKAHVNSLGENLKT

SEQ ID NO: 357 - protein, 100 aa, Homo sapiens
SPGQGTQSENSCTHFPGNLPNMLRDLRDAFSRVKTFFQMKDQLDNLLLKESLLEDFKGYLGCQALSEMIQFYLEEVMPQAENQDADIKAHVNSLGENLKT

SEQ ID NO: 358 - protein, 100 aa, Homo sapiens
SPGQGTQSENSCTHFPGNLPNMLRDLRDAFSRVKTFFQMKDQLDNLLLKESLLEDFKGYLGCQALSEMIQFYLEEVMPQAENQDPQIKAHVNSLGENLKT

SEQ ID NO: 359 - protein, 100 aa, Homo sapiens
SPGQGTQSENSCTHFPGNLPNMLRDLRDAFSRVKTFFQMKDQLDNLLLKESLLEDFKGYLGCQALSEMIQFYLEEVMPQAENQDPNIKAHVNSLGENLKT

SEQ ID NO: 360 - protein, 100 aa, Homo sapiens
SPGQGTQSENSCTHFPGNLPNMLRDLRDAFSRVKTFFQMKDQLDNLLLKESLLEDFKGYLGCQALSEMIQFYLEEVMPQAENQDPDIQAHVNSLGENLKT

SEQ ID NO: 361 - protein, 100 aa, Homo sapiens
SPGQGTQSENSCTHFPGNLPNMLRDLRDAFSRVKTFFQMKDQLDNLLLKESLLEDFKGYLGCQALSEMIQFYLEEVMPQAENQDPDINAHVNSLGENLKT

SEQ ID NO: 362 - protein, 127 aa, Homo sapiens
APARSPSPSTQPWEHVNAIQEARRLLNLSRDTAAEMNQTVEVISEMFDLQEPTCLQTRLELYKQGLRGSLTKLKGPLTMMASHYKQHCPPTPETSCATQIITFESFKENLKDFLLVIPFDCWEPVQE

SEQ ID NO: 363 - protein, 127 aa, Homo sapiens
APARSPSPSTQPWEHVNAIQEARRLLNLSRDTAAEMNNTVEVISEMFDLQEPTCLQTRLELYKQGLRGSLTKLKGPLTMMASHYKQHCPPTPETSCATQIITFESFKENLKDFLLVIPFDCWEPVQE

SEQ ID NO: 364 - protein, 127 aa, Homo sapiens
APARSPSPSTQPWEHVNAIQEARRLLNLSRDTAAEMNHTVEVISEMFDLQEPTCLQTRLELYKQGLRGSLTKLKGPLTMMASHYKQHCPPTPETSCATQIITFESFKENLKDFLLVIPFDCWEPVQE

SEQ ID NO: 365 - protein, 127 aa, Homo sapiens
APARSPSPSTQPWEHVNAIQEARRLLNLSRDTAAEMNETVQVISEMFDLQEPTCLQTRLELYKQGLRGSLTKLKGPLTMMASHYKQHCPPTPETSCATQIITFESFKENLKDFLLVIPFDCWEPVQE

SEQ ID NO: 366 - protein, 127 aa, Homo sapiens
APARSPSPSTQPWEHVNAIQEARRLLNLSRDTAAEMNETVNVISEMFDLQEPTCLQTRLELYKQGLRGSLTKLKGPLTMMASHYKQHCPPTPETSCATQIITFESFKENLKDFLLVIPFDCWEPVQE

SEQ ID NO: 367 - protein, 127 aa, Homo sapiens
APARSPSPSTQPWEHVNAIQEARRLLNLSRDTAAEMNETVHVISEMFDLQEPTCLQTRLELYKQGLRGSLTKLKGPLTMMASHYKQHCPPTPETSCATQIITFESFKENLKDFLLVIPFDCWEPVQE

SEQ ID NO: 368 - protein, 127 aa, Homo sapiens
APARSPSPSTQPWEHVNAIQEARRLLNLSRDTAAEMNETVEVISQMFDLQEPTCLQTRLELYKQGLRGSLTKLKGPLTMMASHYKQHCPPTPETSCATQIITFESFKENLKDFLLVIPFDCWEPVQE

SEQ ID NO: 369 - protein, 127 aa, Homo sapiens
APARSPSPSTQPWEHVNAIQEARRLLNLSRDTAAEMNETVEVISNMFDLQEPTCLQTRLELYKQGLRGSLTKLKGPLTMMASHYKQHCPPTPETSCATQIITFESFKENLKDFLLVIPFDCWEPVQE

SEQ ID NO: 370 - protein, 127 aa, Homo sapiens
APARSPSPSTQPWEHVNAIQEARRLLNLSRDTAAEMNETVEVISHMFDLQEPTCLQTRLELYKQGLRGSLTKLKGPLTMMASHYKQHCPPTPETSCATQIITFESFKENLKDFLLVIPFDCWEPVQE

SEQ ID NO: 371 - protein, 127 aa, Homo sapiens
APARSPSPSTQPWEHVNAIQEARRLLNLSRDTAAEMNETVEVISEVFDLQEPTCLQTRLELYKQGLRGSLTKLKGPLTMMASHYKQHCPPTPETSCATQIITFESFKENLKDFLLVIPFDCWEPVQE

SEQ ID NO: 372 - protein, 127 aa, Homo sapiens
APARSPSPSTQPWEHVNAIQEARRLLNLSRDTAAEMNETVEVISEIFDLQEPTCLQTRLELYKQGLRGSLTKLKGPLTMMASHYKQHCPPTPETSCATQIITFESFKENLKDFLLVIPFDCWEPVQE

SEQ ID NO: 373 - protein, 127 aa, Homo sapiens
APARSPSPSTQPWEHVNAIQEARRLLNLSRDTAAEMNETVEVISEMFQLQEPTCLQTRLELYKQGLRGSLTKLKGPLTMMASHYKQHCPPTPETSCATQIITFESFKENLKDFLLVIPFDCWEPVQE

SEQ ID NO: 374 - protein, 127 aa, Homo sapiens
APARSPSPSTQPWEHVNAIQEARRLLNLSRDTAAEMNETVEVISEMFNLQEPTCLQTRLELYKQGLRGSLTKLKGPLTMMASHYKQHCPPTPETSCATQIITFESFKENLKDFLLVIPFDCWEPVQE

SEQ ID NO: 375 - protein, 127 aa, Homo sapiens
APARSPSPSTQPWEHVNAIQEARRLLNLSRDTAAEMNETVEVISEMFDVQEPTCLQTRLELYKQGLRGSLTKLKGPLTMMASHYKQHCPPTPETSCATQIITFESFKENLKDFLLVIPFDCWEPVQE

SEQ ID NO: 376 - protein, 127 aa, Homo sapiens
APARSPSPSTQPWEHVNAIQEARRLLNLSRDTAAEMNETVEVISEMFDIQEPTCLQTRLELYKQGLRGSLTKLKGPLTMMASHYKQHCPPTPETSCATQIITFESFKENLKDFLLVIPFDCWEPVQE

SEQ ID NO: 377 - protein, 127 aa, Homo sapiens
APARSPSPSTQPWEHVNAIQEARRLLNLSRDTAAEMNETVEVISEMFDLQQPTCLQTRLELYKQGLRGSLTKLKGPLTMMASHYKQHCPPTPETSCATQIITFESFKENLKDFLLVIPFDCWEPVQE

SEQ ID NO: 378 - protein, 127 aa, Homo sapiens
APARSPSPSTQPWEHVNAIQEARRLLNLSRDTAAEMNETVEVISEMFDLQNPTCLQTRLELYKQGLRGSLTKLKGPLTMMASHYKQHCPPTPETSCATQIITFESFKENLKDFLLVIPFDCWEPVQE

SEQ ID NO: 379 - protein, 127 aa, Homo sapiens
APARSPSPSTQPWEHVNAIQEARRLLNLSRDTAAEMNETVEVISEMFDLQHPTCLQTRLELYKQGLRGSLTKLKGPLTMMASHYKQHCPPTPETSCATQIITFESFKENLKDFLLVIPFDCWEPVQE

SEQ ID NO: 380 - protein, 127 aa, Homo sapiens
APARSPSPSTQPWEHVNAIQEARRLLNLSRDTAAEMNETVEVISEMFDLQEPTCLQTRLQLYKQGLRGSLTKLKGPLTMMASHYKQHCPPTPETSCATQIITFESFKENLKDFLLVIPFDCWEPVQE

SEQ ID NO: 381 - protein, 127 aa, Homo sapiens
APARSPSPSTQPWEHVNAIQEARRLLNLSRDTAAEMNETVEVISEMFDLQEPTCLQTRLNLYKQGLRGSLTKLKGPLTMMASHYKQHCPPTPETSCATQIITFESFKENLKDFLLVIPFDCWEPVQE

SEQ ID NO: 382 - protein, 127 aa, Homo sapiens
APARSPSPSTQPWEHVNAIQEARRLLNLSRDTAAEMNETVEVISEMFDLQEPTCLQTRLHLYKQGLRGSLTKLKGPLTMMASHYKQHCPPTPETSCATQIITFESFKENLKDFLLVIPFDCWEPVQE

SEQ ID NO: 383 - protein, 127 aa, Homo sapiens
APARSPSPSTQPWEHVNAIQEARRLLNLSRDTAAEMNETVEVISEMFDLQEPTCLQTRLELYQQGLRGSLTKLKGPLTMMASHYKQHCPPTPETSCATQIITFESFKENLKDFLLVIPFDCWEPVQE

SEQ ID NO: 384 - protein, 127 aa, Homo sapiens
APARSPSPSTQPWEHVNAIQEARRLLNLSRDTAAEMNETVEVISEMFDLQEPTCLQTRLELYNQGLRGSLTKLKGPLTMMASHYKQHCPPTPETSCATQIITFESFKENLKDFLLVIPFDCWEPVQE

SEQ ID NO: 385 - protein, 127 aa, Homo sapiens
APARSPSPSTQPWEHVNAIQEARRLLNLSRDTAAEMNETVEVISEMFDLQEPTCLQTRLELYKQGLHGSLTKLKGPLTMMASHYKQHCPPTPETSCATQIITFESFKENLKDFLLVIPFDCWEPVQE

SEQ ID NO: 386 - protein, 127 aa, Homo sapiens
APARSPSPSTQPWEHVNAIQEARRLLNLSRDTAAEMNETVEVISEMFDLQEPTCLQTRLELYKQGLQGSLTKLKGPLTMMASHYKQHCPPTPETSCATQIITFESFKENLKDFLLVIPFDCWEPVQE

SEQ ID NO: 387 - protein, 127 aa, Homo sapiens
APARSPSPSTQPWEHVNAIQEARRLLNLSRDTAAEMNETVEVISEMFDLQEPTCLQTRLELYKQGLRGSLTKLKGPLTMMASHYKQHCPPTSETSCATQIITFESFKENLKDFLLVIPFDCWEPVQE

SEQ ID NO: 388 - protein, 127 aa, Homo sapiens
APARSPSPSTQPWEHVNAIQEARRLLNLSRDTAAEMNETVEVISEMFDLQEPTCLQTRLELYKQGLRGSLTKLKGPLTMMASHYKQHCPPTAETSCATQIITFESFKENLKDFLLVIPFDCWEPVQE

SEQ ID NO: 389 - protein, 127 aa, Homo sapiens
APARSPSPSTQPWEHVNAIQEARRLLNLSRDTAAEMNETVEVISEMFDLQEPTCLQTRLELYKQGLRGSLTKLKGPLTMMASHYKQHCPPTPQTSCATQIITFESFKENLKDFLLVIPFDCWEPVQE

SEQ ID NO: 390 - protein, 127 aa, Homo sapiens
APARSPSPSTQPWEHVNAIQEARRLLNLSRDTAAEMNETVEVISEMFDLQEPTCLQTRLELYKQGLRGSLTKLKGPLTMMASHYKQHCPPTPNTSCATQIITFESFKENLKDFLLVIPFDCWEPVQE

SEQ ID NO: 391 - protein, 127 aa, Homo sapiens
APARSPSPSTQPWEHVNAIQEARRLLNLSRDTAAEMNETVEVISEMFDLQEPTCLQTRLELYKQGLRGSLTKLKGPLTMMASHYKQHCPPTPHTSCATQIITFESFKENLKDFLLVIPFDCWEPVQE

SEQ ID NO: 392 - protein, 127 aa, Homo sapiens
APARSPSPSTQPWEHVNAIQEARRLLNLSRDTAAEMNETVEVISEMFDLQEPTCLQTRLELYKQGLRGSLTKLKGPLTMMASHYKQHCPPTPETSCATQIITFESFKENLKDFLLVIPIDCWEPVQE

SEQ ID NO: 393 - protein, 127 aa, Homo sapiens
APARSPSPSTQPWEHVNAIQEARRLLNLSRDTAAEMNETVEVISEMFDLQEPTCLQTRLELYKQGLRGSLTKLKGPLTMMASHYKQHCPPTPETSCATQIITFESFKENLKDFLLVIPVDCWEPVQE

SEQ ID NO: 394 - protein, 127 aa, Homo sapiens
APARSPSPSTQPWEHVNAIQEARRLLNLSRDTAAEMNETVEVISEMFDLQEPTCLQTRLELYKQGLRGSLTKLKGPLTMMASHYKQHCPPTPETSCATQIITFESFKENLKDFLLVIPFQCWEPVQE

SEQ ID NO: 395 - protein, 127 aa, Homo sapiens
APARSPSPSTQPWEHVNAIQEARRLLNLSRDTAAEMNETVEVISEMFDLQEPTCLQTRLELYKQGLRGSLTKLKGPLTMMASHYKQHCPPTPETSCATQIITFESFKENLKDFLLVIPFNCWEPVQE

SEQ ID NO: 396 - protein, 127 aa, Homo sapiens
APARSPSPSTQPWEHVNAIQEARRLLNLSRDTAAEMNETVEVISEMFDLQEPTCLQTRLELYKQGLRGSLTKLKGPLTMMASHYKQHCPPTPETSCATQIITFESFKENLKDFLLVIPFDCWQPVQE

SEQ ID NO: 397 - protein, 127 aa, Homo sapiens
APARSPSPSTQPWEHVNAIQEARRLLNLSRDTAAEMNETVEVISEMFDLQEPTCLQTRLELYKQGLRGSLTKLKGPLTMMASHYKQHCPPTPETSCATQIITFESFKENLKDFLLVIPFDCWNPVQE

SEQ ID NO: 398 - protein, 127 aa, Homo sapiens
APARSPSPSTQPWEHVNAIQEARRLLNLSRDTAAEMNETVEVISEMFDLQEPTCLQTRLELYKQGLRGSLTKLKGPLTMMASHYKQHCPPTPETSCATQIITFESFKENLKDFLLVIPFDCWHPVQE

SEQ ID NO: 399 - protein, 127 aa, Homo sapiens
APARSPSPSTQPWEHVNAIQEARRLLNLSRDTAAEMNETVEVISEMFDLQEPTCLQTRLELYKQGLRGSLTKLKGPLTMMASHYKQHCPPTPETSCATQIITFESFKENLKDFLLVIPFDCWESVQE

SEQ ID NO: 400 - protein, 127 aa, Homo sapiens
APARSPSPSTQPWEHVNAIQEARRLLNLSRDTAAEMNETVEVISEMFDLQEPTCLQTRLELYKQGLRGSLTKLKGPLTMMASHYKQHCPPTPETSCATQIITFESFKENLKDFLLVIPFDCWEAVQE

SEQ ID NO: 401 - protein, 100 aa, Homo sapiens
TQQCSFQHSPISSDFAVKIRELSDYLLQDYPVTVASNLQDEELCGGLWRLVLAQRWMERLKTVAGSKMQGLLERVNTEIHFVTKCAFQPPPSCLRFVQTN

SEQ ID NO: 402 - protein, 100 aa, Homo sapiens
TQNCSFQHSPISSDFAVKIRELSDYLLQDYPVTVASNLQDEELCGGLWRLVLAQRWMERLKTVAGSKMQGLLERVNTEIHFVTKCAFQPPPSCLRFVQTN

SEQ ID NO: 403 - protein, 100 aa, Homo sapiens
TQDCSFQHSPISSDFAVKIRELSDYLLQDYPVTVASNLQQEELCGGLWRLVLAQRWMERLKTVAGSKMQGLLERVNTEIHFVTKCAFQPPPSCLRFVQTN

SEQ ID NO: 404 - protein, 100 aa, Homo sapiens
TQDCSFQHSPISSDFAVKIRELSDYLLQDYPVTVASNLQNEELCGGLWRLVLAQRWMERLKTVAGSKMQGLLERVNTEIHFVTKCAFQPPPSCLRFVQTN

SEQ ID NO: 405 - protein, 100 aa, Homo sapiens
TQDCSFQHSPISSDFAVKIRELSDYLLQDYPVTVASNLQDEQLCGGLWRLVLAQRWMERLKTVAGSKMQGLLERVNTEIHFVTKCAFQPPPSCLRFVQTN

SEQ ID NO: 406 - protein, 100 aa, Homo sapiens
TQDCSFQHSPISSDFAVKIRELSDYLLQDYPVTVASNLQDENLCGGLWRLVLAQRWMERLKTVAGSKMQGLLERVNTEIHFVTKCAFQPPPSCLRFVQTN

SEQ ID NO: 407 - protein, 100 aa, Homo sapiens
TQDCSFQHSPISSDFAVKIRELSDYLLQDYPVTVASNLQDEHLCGGLWRLVLAQRWMERLKTVAGSKMQGLLERVNTEIHFVTKCAFQPPPSCLRFVQTN

SEQ ID NO: 408 - protein, 100 aa, Homo sapiens
TQDCSFQHSPISSDFAVKIRELSDYLLQDYPVTVASNLQDEEVCGGLWRLVLAQRWMERLKTVAGSKMQGLLERVNTEIHFVTKCAFQPPPSCLRFVQTN

SEQ ID NO: 409 - protein, 100 aa, Homo sapiens
TQDCSFQHSPISSDFAVKIRELSDYLLQDYPVTVASNLQDEEICGGLWRLVLAQRWMERLKTVAGSKMQGLLERVNTEIHFVTKCAFQPPPSCLRFVQTN

SEQ ID NO: 410 - protein, 100 aa, Homo sapiens
TQDCSFQHSPISSDFAVKIRELSDYLLQDYPVTVASNLQDEELCGGLWRLVLAQHWMERLKTVAGSKMQGLLERVNTEIHFVTKCAFQPPPSCLRFVQTN

SEQ ID NO: 411 - protein, 100 aa, Homo sapiens
TQDCSFQHSPISSDFAVKIRELSDYLLQDYPVTVASNLQDEELCGGLWRLVLAQQWMERLKTVAGSKMQGLLERVNTEIHFVTKCAFQPPPSCLRFVQTN

SEQ ID NO: 412 - protein, 100 aa, Homo sapiens
TQDCSFQHSPISSDFAVKIRELSDYLLQDYPVTVASNLQDEELCGGLWRLVLAQRWMQRLKTVAGSKMQGLLERVNTEIHFVTKCAFQPPPSCLRFVQTN

SEQ ID NO: 413 - protein, 100 aa, Homo sapiens
TQDCSFQHSPISSDFAVKIRELSDYLLQDYPVTVASNLQDEELCGGLWRLVLAQRWMNRLKTVAGSKMQGLLERVNTEIHFVTKCAFQPPPSCLRFVQTN

SEQ ID NO: 414 - protein, 100 aa, Homo sapiens
TQDCSFQHSPISSDFAVKIRELSDYLLQDYPVTVASNLQDEELCGGLWRLVLAQRWMHRLKTVAGSKMQGLLERVNTEIHFVTKCAFQPPPSCLRFVQTN

SEQ ID NO: 415 - protein, 100 aa, Homo sapiens
TQDCSFQHSPISSDFAVKIRELSDYLLQDYPVTVASNLQDEELCGGLWRLVLAQRWMEHLKTVAGSKMQGLLERVNTEIHFVTKCAFQPPPSCLRFVQTN

SEQ ID NO: 416 - protein, 100 aa, Homo sapiens
TQDCSFQHSPISSDFAVKIRELSDYLLQDYPVTVASNLQDEELCGGLWRLVLAQRWMEQLKTVAGSKMQGLLERVNTEIHFVTKCAFQPPPSCLRFVQTN

SEQ ID NO: 417 - protein, 100 aa, Homo sapiens
TQDCSFQHSPISSDFAVKIRELSDYLLQDYPVTVASNLQDEELCGGLWRLVLAQRWMERLQTVAGSKMQGLLERVNTEIHFVTKCAFQPPPSCLRFVQTN

SEQ ID NO: 418 - protein, 100 aa, Homo sapiens
TQDCSFQHSPISSDFAVKIRELSDYLLQDYPVTVASNLQDEELCGGLWRLVLAQRWMERLNTVAGSKMQGLLERVNTEIHFVTKCAFQPPPSCLRFVQTN

SEQ ID NO: 419 - protein, 100 aa, Homo sapiens
TQDCSFQHSPISSDFAVKIRELSDYLLQDYPVTVASNLQDEELCGGLWRLVLAQRWMERLKTVAGSKMQGLLERVNTEIHFVTKCAFQSPPSCLRFVQTN

SEQ ID NO: 420 - protein, 100 aa, Homo sapiens
TQDCSFQHSPISSDFAVKIRELSDYLLQDYPVTVASNLQDEELCGGLWRLVLAQRWMERLKTVAGSKMQGLLERVNTEIHFVTKCAFQAPPSCLRFVQTN

SEQ ID NO: 421 - protein, 100 aa, Homo sapiens
TQDCSFQHSPISSDFAVKIRELSDYLLQDYPVTVASNLQDEELCGGLWRLVLAQRWMERLKTVAGSKMQGLLERVNTEIHFVTKCAFQPSPSCLRFVQTN

SEQ ID NO: 422 - protein, 100 aa, Homo sapiens
TQDCSFQHSPISSDFAVKIRELSDYLLQDYPVTVASNLQDEELCGGLWRLVLAQRWMERLKTVAGSKMQGLLERVNTEIHFVTKCAFQPAPSCLRFVQTN

SEQ ID NO: 423 - protein, 100 aa, Homo sapiens
TQDCSFQHSPISSDFAVKIRELSDYLLQDYPVTVASNLQDEELCGGLWRLVLAQRWMERLKTVAGSKMQGLLERVNTEIHFVTKCAFQPPSSCLRFVQTN

SEQ ID NO: 424 - protein, 100 aa, Homo sapiens
TQDCSFQHSPISSDFAVKIRELSDYLLQDYPVTVASNLQDEELCGGLWRLVLAQRWMERLKTVAGSKMQGLLERVNTEIHFVTKCAFQPPASCLRFVQTN

SEQ ID NO: 425 - protein, 100 aa, Homo sapiens
TQDCSFQHSPISSDFAVKIRELSDYLLQDYPVTVASNLQDEELCGGLWRLVLAQRWMERLKTVAGSKMQGLLERVNTEIHFVTKCAFQPPPSCLHFVQTN

SEQ ID NO: 426 - protein, 100 aa, Homo sapiens
TQDCSFQHSPISSDFAVKIRELSDYLLQDYPVTVASNLQDEELCGGLWRLVLAQRWMERLKTVAGSKMQGLLERVNTEIHFVTKCAFQPPPSCLQFVQTN

SEQ ID NO: 427 - protein, 100 aa, Homo sapiens
TQDCSFQHSPISSDFAVKIRELSDYLLQDYPVTVASNLQDEELCGGLWRLVLAQRWMERLKTVAGSKMQGLLERVNTEIHFVTKCAFQPPPSCLRIVQTN

SEQ ID NO: 428 - protein, 100 aa, Homo sapiens
TQDCSFQHSPISSDFAVKIRELSDYLLQDYPVTVASNLQDEELCGGLWRLVLAQRWMERLKTVAGSKMQGLLERVNTEIHFVTKCAFQPPPSCLRVVQTN

SEQ ID NO: 429 - protein, 133 aa, Homo sapiens
APTSSSTKKTQLQLEHLLLDLQMILNGINNYKNPKLTRMLTFQFYMPKKATELKHLQCLEEELKPLEEVLNLAQSKNFHLRPRDLISNINVIVLELKGSETTFMCEYADETATIVEFLNRWITFCQSIISTLT

SEQ ID NO: 430 - protein, 133 aa, Homo sapiens
APTSSSTKKTQLQLEHLLLDLQMILNGINNYKNPKLTRMLTFNFYMPKKATELKHLQCLEEELKPLEEVLNLAQSKNFHLRPRDLISNINVIVLELKGSETTFMCEYADETATIVEFLNRWITFCQSIISTLT

SEQ ID NO: 431 - protein, 133 aa, Homo sapiens
APTSSSTKKTQLQLEHLLLDLQMILNGINNYKNPKLTRMLTFKFHMPKKATELKHLQCLEEELKPLEEVLNLAQSKNFHLRPRDLISNINVIVLELKGSETTFMCEYADETATIVEFLNRWITFCQSIISTLT

SEQ ID NO: 432 - protein, 133 aa, Homo sapiens
APTSSSTKKTQLQLEHLLLDLQMILNGINNYKNPKLTRMLTFKFIMPKKATELKHLQCLEEELKPLEEVLNLAQSKNFHLRPRDLISNINVIVLELKGSETTFMCEYADETATIVEFLNRWITFCQSIISTLT

SEQ ID NO: 433 - protein, 133 aa, Homo sapiens
APTSSSTKKTQLQLEHLLLDLQMILNGINNYKNPKLTRMLTFKFYMPQKATELKHLQCLEEELKPLEEVLNLAQSKNFHLRPRDLISNINVIVLELKGSETTFMCEYADETATIVEFLNRWITFCQSIISTLT

SEQ ID NO: 434 - protein, 133 aa, Homo sapiens
APTSSSTKKTQLQLEHLLLDLQMILNGINNYKNPKLTRMLTFKFYMPNKATELKHLQCLEEELKPLEEVLNLAQSKNFHLRPRDLISNINVIVLELKGSETTFMCEYADETATIVEFLNRWITFCQSIISTLT

SEQ ID NO: 435 - protein, 133 aa, Homo sapiens
APTSSSTKKTQLQLEHLLLDLQMILNGINNYKNPKLTRMLTFKFYMPKQATELKHLQCLEEELKPLEEVLNLAQSKNFHLRPRDLISNINVIVLELKGSETTFMCEYADETATIVEFLNRWITFCQSIISTLT

SEQ ID NO: 436 - protein, 133 aa, Homo sapiens
APTSSSTKKTQLQLEHLLLDLQMILNGINNYKNPKLTRMLTFKFYMPKNATELKHLQCLEEELKPLEEVLNLAQSKNFHLRPRDLISNINVIVLELKGSETTFMCEYADETATIVEFLNRWITFCQSIISTLT

SEQ ID NO: 437 - protein, 133 aa, Homo sapiens
APTSSSTKKTQLQLEHLLLDLQMILNGINNYKNPKLTRMLTFKFYMPKKATQLKHLQCLEEELKPLEEVLNLAQSKNFHLRPRDLISNINVIVLELKGSETTFMCEYADETATIVEFLNRWITFCQSIISTLT

SEQ ID NO: 438 - protein, 133 aa, Homo sapiens
APTSSSTKKTQLQLEHLLLDLQMILNGINNYKNPKLTRMLTFKFYMPKKATNLKHLQCLEEELKPLEEVLNLAQSKNFHLRPRDLISNINVIVLELKGSETTFMCEYADETATIVEFLNRWITFCQSIISTLT

SEQ ID NO: 439 - protein, 133 aa, Homo sapiens
APTSSSTKKTQLQLEHLLLDLQMILNGINNYKNPKLTRMLTFKFYMPKKATHLKHLQCLEEELKPLEEVLNLAQSKNFHLRPRDLISNINVIVLELKGSETTFMCEYADETATIVEFLNRWITFCQSIISTLT

SEQ ID NO: 440 - protein, 133 aa, Homo sapiens
APTSSSTKKTQLQLEHLLLDLQMILNGINNYKNPKLTRMLTFKFYMPKKATEVKHLQCLEEELKPLEEVLNLAQSKNFHLRPRDLISNINVIVLELKGSETTFMCEYADETATIVEFLNRWITFCQSIISTLT

SEQ ID NO: 441 - protein, 133 aa, Homo sapiens
APTSSSTKKTQLQLEHLLLDLQMILNGINNYKNPKLTRMLTFKFYMPKKATEIKHLQCLEEELKPLEEVLNLAQSKNFHLRPRDLISNINVIVLELKGSETTFMCEYADETATIVEFLNRWITFCQSIISTLT

SEQ ID NO: 442 - protein, 133 aa, Homo sapiens
APTSSSTKKTQLQLEHLLLDLQMILNGINNYKNPKLTRMLTFKFYMPKKATELKHLQCLQEELKPLEEVLNLAQSKNFHLRPRDLISNINVIVLELKGSETTFMCEYADETATIVEFLNRWITFCQSIISTLT

SEQ ID NO: 443 - protein, 133 aa, Homo sapiens
APTSSSTKKTQLQLEHLLLDLQMILNGINNYKNPKLTRMLTFKFYMPKKATELKHLQCLNEELKPLEEVLNLAQSKNFHLRPRDLISNINVIVLELKGSETTFMCEYADETATIVEFLNRWITFCQSIISTLT

SEQ ID NO: 444 - protein, 133 aa, Homo sapiens
APTSSSTKKTQLQLEHLLLDLQMILNGINNYKNPKLTRMLTFKFYMPKKATELKHLQCLHEELKPLEEVLNLAQSKNFHLRPRDLISNINVIVLELKGSETTFMCEYADETATIVEFLNRWITFCQSIISTLT

SEQ ID NO: 445 - protein, 133 aa, Homo sapiens
APTSSSTKKTQLQLEHLLLDLQMILNGINNYKNPKLTRMLTFKFYMPKKATELKHLQCLEQELKPLEEVLNLAQSKNFHLRPRDLISNINVIVLELKGSETTFMCEYADETATIVEFLNRWITFCQSIISTLT

SEQ ID NO: 446 - protein, 133 aa, Homo sapiens
APTSSSTKKTQLQLEHLLLDLQMILNGINNYKNPKLTRMLTFKFYMPKKATELKHLQCLENELKPLEEVLNLAQSKNFHLRPRDLISNINVIVLELKGSETTFMCEYADETATIVEFLNRWITFCQSIISTLT

SEQ ID NO: 447 - protein, 133 aa, Homo sapiens
APTSSSTKKTQLQLEHLLLDLQMILNGINNYKNPKLTRMLTFKFYMPKKATELKHLQCLEHELKPLEEVLNLAQSKNFHLRPRDLISNINVIVLELKGSETTFMCEYADETATIVEFLNRWITFCQSIISTLT

SEQ ID NO: 448 - protein, 133 aa, Homo sapiens
APTSSSTKKTQLQLEHLLLDLQMILNGINNYKNPKLTRMLTFKFYMPKKATELKHLQCLEEELKSLEEVLNLAQSKNFHLRPRDLISNINVIVLELKGSETTFMCEYADETATIVEFLNRWITFCQSIISTLT

SEQ ID NO: 449 - protein, 133 aa, Homo sapiens
APTSSSTKKTQLQLEHLLLDLQMILNGINNYKNPKLTRMLTFKFYMPKKATELKHLQCLEEELKALEEVLNLAQSKNFHLRPRDLISNINVIVLELKGSETTFMCEYADETATIVEFLNRWITFCQSIISTLT

SEQ ID NO: 450 - protein, 133 aa, Homo sapiens
APTSSSTKKTQLQLEHLLLDLQMILNGINNYKNPKLTRMLTFKFYMPKKATELKHLQCLEEELKPLQEVLNLAQSKNFHLRPRDLISNINVIVLELKGSETTFMCEYADETATIVEFLNRWITFCQSIISTLT

SEQ ID NO: 451 - protein, 133 aa, Homo sapiens
APTSSSTKKTQLQLEHLLLDLQMILNGINNYKNPKLTRMLTFKFYMPKKATELKHLQCLEEELKPLNEVLNLAQSKNFHLRPRDLISNINVIVLELKGSETTFMCEYADETATIVEFLNRWITFCQSIISTLT

SEQ ID NO: 452 - protein, 133 aa, Homo sapiens
APTSSSTKKTQLQLEHLLLDLQMILNGINNYKNPKLTRMLTFKFYMPKKATELKHLQCLEEELKPLHEVLNLAQSKNFHLRPRDLISNINVIVLELKGSETTFMCEYADETATIVEFLNRWITFCQSIISTLT

SEQ ID NO: 453 - protein, 133 aa, Homo sapiens
APTSSSTKKTQLQLEHLLLDLQMILNGINNYKNPKLTRMLTFKFYMPKKATELKHLQCLEEELKPLEQVLNLAQSKNFHLRPRDLISNINVIVLELKGSETTFMCEYADETATIVEFLNRWITFCQSIISTLT

SEQ ID NO: 454 - protein, 133 aa, Homo sapiens
APTSSSTKKTQLQLEHLLLDLQMILNGINNYKNPKLTRMLTFKFYMPKKATELKHLQCLEEELKPLENVLNLAQSKNFHLRPRDLISNINVIVLELKGSETTFMCEYADETATIVEFLNRWITFCQSIISTLT

SEQ ID NO: 455 - protein, 133 aa, Homo sapiens
APTSSSTKKTQLQLEHLLLDLQMILNGINNYKNPKLTRMLTFKFYMPKKATELKHLQCLEEELKPLEHVLNLAQSKNFHLRPRDLISNINVIVLELKGSETTFMCEYADETATIVEFLNRWITFCQSIISTLT

SEQ ID NO: 456 - protein, 133 aa, Homo sapiens
APTSSSTKKTQLQLEHLLLDLQMILNGINNYKNPKLTRMLTFKFYMPKKATELKHLQCLEEELKPLEEVLNVAQSKNFHLRPRDLISNINVIVLELKGSETTFMCEYADETATIVEFLNRWITFCQSIISTLT

SEQ ID NO: 457 - protein, 133 aa, Homo sapiens
APTSSSTKKTQLQLEHLLLDLQMILNGINNYKNPKLTRMLTFKFYMPKKATELKHLQCLEEELKPLEEVLNIAQSKNFHLRPRDLISNINVIVLELKGSETTFMCEYADETATIVEFLNRWITFCQSIISTLT

SEQ ID NO: 458 - protein, 133 aa, Homo sapiens
APTSSSTKKTQLQLEHLLLDLQMILNGINNYKNPKLTRMLTFKFYMPKKATELKHLQCLEEELKPLEEVLNLAQSKNFHLRPRDLISNINVIVLELKGSQTTFMCEYADETATIVEFLNRWITFCQSIISTLT

SEQ ID NO: 459 - protein, 133 aa, Homo sapiens
APTSSSTKKTQLQLEHLLLDLQMILNGINNYKNPKLTRMLTFKFYMPKKATELKHLQCLEEELKPLEEVLNLAQSKNFHLRPRDLISNINVIVLELKGSNTTFMCEYADETATIVEFLNRWITFCQSIISTLT

SEQ ID NO: 460 - protein, 133 aa, Homo sapiens
APTSSSTKKTQLQLEHLLLDLQMILNGINNYKNPKLTRMLTFKFYMPKKATELKHLQCLEEELKPLEEVLNLAQSKNFHLRPRDLISNINVIVLELKGSHTTFMCEYADETATIVEFLNRWITFCQSIISTLT

SEQ ID NO: 461 - protein, 133 aa, Homo sapiens
APTSSSTKKTQLQLEHLLLDLQMILNGINNYKNPKLTRMLTFKFYMPKKATELKHLQCLEEELKPLEEVLNLAQSKNFHLRPRDLISNINVIVLELKGSETTIMCEYADETATIVEFLNRWITFCQSIISTLT

SEQ ID NO: 462 - protein, 133 aa, Homo sapiens
APTSSSTKKTQLQLEHLLLDLQMILNGINNYKNPKLTRMLTFKFYMPKKATELKHLQCLEEELKPLEEVLNLAQSKNFHLRPRDLISNINVIVLELKGSETTVMCEYADETATIVEFLNRWITFCQSIISTLT

SEQ ID NO: 463 - protein, 133 aa, Homo sapiens
APTSSSTKKTQLQLEHLLLDLQMILNGINNYKNPKLTRMLTFKFYMPKKATELKHLQCLEEELKPLEEVLNLAQSKNFHLRPRDLISNINVIVLELKGSETTFVCEYADETATIVEFLNRWITFCQSIISTLT

SEQ ID NO: 464 - protein, 133 aa, Homo sapiens
APTSSSTKKTQLQLEHLLLDLQMILNGINNYKNPKLTRMLTFKFYMPKKATELKHLQCLEEELKPLEEVLNLAQSKNFHLRPRDLISNINVIVLELKGSETTFICEYADETATIVEFLNRWITFCQSIISTLT

SEQ ID NO: 465 - protein, 133 aa, Homo sapiens
APTSSSTKKTQLQLEHLLLDLQMILNGINNYKNPKLTRMLTFKFYMPKKATELKHLQCLEEELKPLEEVLNLAQSKNFHLRPRDLISNINVIVLELKGSETTFMCQYADETATIVEFLNRWITFCQSIISTLT

SEQ ID NO: 466 - protein, 133 aa, Homo sapiens
APTSSSTKKTQLQLEHLLLDLQMILNGINNYKNPKLTRMLTFKFYMPKKATELKHLQCLEEELKPLEEVLNLAQSKNFHLRPRDLISNINVIVLELKGSETTFMCNYADETATIVEFLNRWITFCQSIISTLT

SEQ ID NO: 467 - protein, 133 aa, Homo sapiens
APTSSSTKKTQLQLEHLLLDLQMILNGINNYKNPKLTRMLTFKFYMPKKATELKHLQCLEEELKPLEEVLNLAQSKNFHLRPRDLISNINVIVLELKGSETTFMCHYADETATIVEFLNRWITFCQSIISTLT

SEQ ID NO: 468 - protein, 133 aa, Homo sapiens
APTSSSTKKTQLQLEHLLLDLQMILNGINNYKNPKLTRMLTFKFYMPKKATELKHLQCLEEELKPLEEVLNLAQSKNFHLRPRDLISNINVIVLELKGSETTFMCEHADETATIVEFLNRWITFCQSIISTLT

SEQ ID NO: 469 - protein, 133 aa, Homo sapiens
APTSSSTKKTQLQLEHLLLDLQMILNGINNYKNPKLTRMLTFKFYMPKKATELKHLQCLEEELKPLEEVLNLAQSKNFHLRPRDLISNINVIVLELKGSETTFMCEIADETATIVEFLNRWITFCQSIISTLT

SEQ ID NO: 470 - protein, 133 aa, Homo sapiens
APTSSSTKKTQLQLEHLLLDLQMILNGINNYKNPKLTRMLTFKFYMPKKATELKHLQCLEEELKPLEEVLNLAQSKNFHLRPRDLISNINVIVLELKGSETTFMCEYAQETATIVEFLNRWITFCQSIISTLT

SEQ ID NO: 471 - protein, 133 aa, Homo sapiens
APTSSSTKKTQLQLEHLLLDLQMILNGINNYKNPKLTRMLTFKFYMPKKATELKHLQCLEEELKPLEEVLNLAQSKNFHLRPRDLISNINVIVLELKGSETTFMCEYANETATIVEFLNRWITFCQSIISTLT

SEQ ID NO: 472 - protein, 133 aa, Homo sapiens
APTSSSTKKTQLQLEHLLLDLQMILNGINNYKNPKLTRMLTFKFYMPKKATELKHLQCLEEELKPLEEVLNLAQSKNFHLRPRDLISNINVIVLELKGSETTFMCEYADQTATIVEFLNRWITFCQSIISTLT

SEQ ID NO: 473 - protein, 133 aa, Homo sapiens
APTSSSTKKTQLQLEHLLLDLQMILNGINNYKNPKLTRMLTFKFYMPKKATELKHLQCLEEELKPLEEVLNLAQSKNFHLRPRDLISNINVIVLELKGSETTFMCEYADNTATIVEFLNRWITFCQSIISTLT

SEQ ID NO: 474 - protein, 133 aa, Homo sapiens
APTSSSTKKTQLQLEHLLLDLQMILNGINNYKNPKLTRMLTFKFYMPKKATELKHLQCLEEELKPLEEVLNLAQSKNFHLRPRDLISNINVIVLELKGSETTFMCEYADHTATIVEFLNRWITFCQSIISTLT

SEQ ID NO: 475 - protein, 133 aa, Homo sapiens
APTSSSTKKTQLQLEHLLLDLQMILNGINNYKNPKLTRMLTFKFYMPKKATELKHLQCLEEELKPLEEVLNLAQSKNFHLRPRDLISNINVIVLELKGSETTFMCEYADETATIVEFLNRWITFCQSIISTVT

SEQ ID NO: 476 - protein, 133 aa, Homo sapiens
APTSSSTKKTQLQLEHLLLDLQMILNGINNYKNPKLTRMLTFKFYMPKKATELKHLQCLEEELKPLEEVLNLAQSKNFHLRPRDLISNINVIVLELKGSETTFMCEYADETATIVEFLNRWITFCQSIISTIT

SEQ ID NO: 477 - protein, 133 aa, Homo sapiens
APMTQTTPLKTSWVNCSNMIDEIITHLKQPPLPLLDINNLNGEDQDILMENNLRRPNLEAFNRAVKSLQNASAIESILKNLLPCLPLATAAPTRHPIHIKDGDWNEFRRKLTFYLKTLENAQAQQTTLSLAIF

SEQ ID NO: 478 - protein, 133 aa, Homo sapiens
APMTQTTPLKTSWVNCSNMIDEIITHLKQPPLPLLDVNNLNGEDQDILMENNLRRPNLEAFNRAVKSLQNASAIESILKNLLPCLPLATAAPTRHPIHIKDGDWNEFRRKLTFYLKTLENAQAQQTTLSLAIF

SEQ ID NO: 479 - protein, 133 aa, Homo sapiens
APMTQTTPLKTSWVNCSNMIDEIITHLKQPPLPLLDFNNLNGQDQDILMENNLRRPNLEAFNRAVKSLQNASAIESILKNLLPCLPLATAAPTRHPIHIKDGDWNEFRRKLTFYLKTLENAQAQQTTLSLAIF

SEQ ID NO: 480 - protein, 133 aa, Homo sapiens
APMTQTTPLKTSWVNCSNMIDEIITHLKQPPLPLLDFNNLNGNDQDILMENNLRRPNLEAFNRAVKSLQNASAIESILKNLLPCLPLATAAPTRHPIHIKDGDWNEFRRKLTFYLKTLENAQAQQTTLSLAIF

SEQ ID NO: 481 - protein, 133 aa, Homo sapiens
APMTQTTPLKTSWVNCSNMIDEIITHLKQPPLPLLDFNNLNGHDQDILMENNLRRPNLEAFNRAVKSLQNASAIESILKNLLPCLPLATAAPTRHPIHIKDGDWNEFRRKLTFYLKTLENAQAQQTTLSLAIF

SEQ ID NO: 482 - protein, 133 aa, Homo sapiens
APMTQTTPLKTSWVNCSNMIDEIITHLKQPPLPLLDFNNLNGEDQQILMENNLRRPNLEAFNRAVKSLQNASAIESILKNLLPCLPLATAAPTRHPIHIKDGDWNEFRRKLTFYLKTLENAQAQQTTLSLAIF

SEQ ID NO: 483 - protein, 133 aa, Homo sapiens
APMTQTTPLKTSWVNCSNMIDEIITHLKQPPLPLLDFNNLNGEDQNILMENNLRRPNLEAFNRAVKSLQNASAIESILKNLLPCLPLATAAPTRHPIHIKDGDWNEFRRKLTFYLKTLENAQAQQTTLSLAIF

SEQ ID NO: 484 - protein, 133 aa, Homo sapiens
APMTQTTPLKTSWVNCSNMIDEIITHLKQPPLPLLDFNNLNGEDQDILMENNLRRPNLQAFNRAVKSLQNASAIESILKNLLPCLPLATAAPTRHPIHIKDGDWNEFRRKLTFYLKTLENAQAQQTTLSLAIF

SEQ ID NO: 485 - protein, 133 aa, Homo sapiens
APMTQTTPLKTSWVNCSNMIDEIITHLKQPPLPLLDFNNLNGEDQDILMENNLRRPNLNAFNRAVKSLQNASAIESILKNLLPCLPLATAAPTRHPIHIKDGDWNEFRRKLTFYLKTLENAQAQQTTLSLAIF

SEQ ID NO: 486 - protein, 133 aa, Homo sapiens
APMTQTTPLKTSWVNCSNMIDEIITHLKQPPLPLLDFNNLNGEDQDILMENNLRRPNLHAFNRAVKSLQNASAIESILKNLLPCLPLATAAPTRHPIHIKDGDWNEFRRKLTFYLKTLENAQAQQTTLSLAIF

SEQ ID NO: 487 - protein, 133 aa, Homo sapiens
APMTQTTPLKTSWVNCSNMIDEIITHLKQPPLPLLDFNNLNGEDQDILMENNLRRPNLEAFNHAVKSLQNASAIESILKNLLPCLPLATAAPTRHPIHIKDGDWNEFRRKLTFYLKTLENAQAQQTTLSLAIF

SEQ ID NO: 488 - protein, 133 aa, Homo sapiens
APMTQTTPLKTSWVNCSNMIDEIITHLKQPPLPLLDFNNLNGEDQDILMENNLRRPNLEAFNQAVKSLQNASAIESILKNLLPCLPLATAAPTRHPIHIKDGDWNEFRRKLTFYLKTLENAQAQQTTLSLAIF

SEQ ID NO: 489 - protein, 133 aa, Homo sapiens
APMTQTTPLKTSWVNCSNMIDEIITHLKQPPLPLLDFNNLNGEDQDILMENNLRRPNLEAFNRAVQSLQNASAIESILKNLLPCLPLATAAPTRHPIHIKDGDWNEFRRKLTFYLKTLENAQAQQTTLSLAIF

SEQ ID NO: 490 - protein, 133 aa, Homo sapiens
APMTQTTPLKTSWVNCSNMIDEIITHLKQPPLPLLDFNNLNGEDQDILMENNLRRPNLEAFNRAVNSLQNASAIESILKNLLPCLPLATAAPTRHPIHIKDGDWNEFRRKLTFYLKTLENAQAQQTTLSLAIF

SEQ ID NO: 491 - protein, 133 aa, Homo sapiens
APMTQTTPLKTSWVNCSNMIDEIITHLKQPPLPLLDFNNLNGEDQDILMENNLRRPNLEAFNRAVKSLQNASAIESILKNLLPCLPLATAAPTRHSIHIKDGDWNEFRRKLTFYLKTLENAQAQQTTLSLAIF

SEQ ID NO: 492 - protein, 133 aa, Homo sapiens
APMTQTTPLKTSWVNCSNMIDEIITHLKQPPLPLLDFNNLNGEDQDILMENNLRRPNLEAFNRAVKSLQNASAIESILKNLLPCLPLATAAPTRHAIHIKDGDWNEFRRKLTFYLKTLENAQAQQTTLSLAIF

SEQ ID NO: 493 - protein, 133 aa, Homo sapiens
APMTQTTPLKTSWVNCSNMIDEIITHLKQPPLPLLDFNNLNGEDQDILMENNLRRPNLEAFNRAVKSLQNASAIESILKNLLPCLPLATAAPTRHPIHIQDGDWNEFRRKLTFYLKTLENAQAQQTTLSLAIF

SEQ ID NO: 494 - protein, 133 aa, Homo sapiens
APMTQTTPLKTSWVNCSNMIDEIITHLKQPPLPLLDFNNLNGEDQDILMENNLRRPNLEAFNRAVKSLQNASAIESILKNLLPCLPLATAAPTRHPIHINDGDWNEFRRKLTFYLKTLENAQAQQTTLSLAIF

SEQ ID NO: 495 - protein, 133 aa, Homo sapiens
APMTQTTPLKTSWVNCSNMIDEIITHLKQPPLPLLDFNNLNGEDQDILMENNLRRPNLEAFNRAVKSLQNASAIESILKNLLPCLPLATAAPTRHPIHIKQGDWNEFRRKLTFYLKTLENAQAQQTTLSLAIF

SEQ ID NO: 496 - protein, 133 aa, Homo sapiens
APMTQTTPLKTSWVNCSNMIDEIITHLKQPPLPLLDFNNLNGEDQDILMENNLRRPNLEAFNRAVKSLQNASAIESILKNLLPCLPLATAAPTRHPIHIKNGDWNEFRRKLTFYLKTLENAQAQQTTLSLAIF

SEQ ID NO: 497 - protein, 133 aa, Homo sapiens
APMTQTTPLKTSWVNCSNMIDEIITHLKQPPLPLLDFNNLNGEDQDILMENNLRRPNLEAFNRAVKSLQNASAIESILKNLLPCLPLATAAPTRHPIHIKDGQWNEFRRKLTFYLKTLENAQAQQTTLSLAIF

SEQ ID NO: 498 - protein, 133 aa, Homo sapiens
APMTQTTPLKTSWVNCSNMIDEIITHLKQPPLPLLDFNNLNGEDQDILMENNLRRPNLEAFNRAVKSLQNASAIESILKNLLPCLPLATAAPTRHPIHIKDGNWNEFRRKLTFYLKTLENAQAQQTTLSLAIF

SEQ ID NO: 499 - protein, 141 aa, Homo sapiens
EGICRNRVTNNVKDVTKLVANLPKDYVITLKYVPGMDVLPSHCWISEMVVQLSDSLTDLLDKFSNISEGLSNYSIIDKLVNIVDDLVECVKENSSKDLKKSFKSPEPRLFTPEEFFRIFNRSIDAFKDFVVASETSDCVVS

SEQ ID NO: 500 - protein, 141 aa, Homo sapiens
EGICRNRVTNNVKDVTKLVANLPKDYIITLKYVPGMDVLPSHCWISEMVVQLSDSLTDLLDKFSNISEGLSNYSIIDKLVNIVDDLVECVKENSSKDLKKSFKSPEPRLFTPEEFFRIFNRSIDAFKDFVVASETSDCVVS

SEQ ID NO: 501 - protein, 141 aa, Homo sapiens
EGICRNRVTNNVKDVTKLVANLPKDYMITLQYVPGMDVLPSHCWISEMVVQLSDSLTDLLDKFSNISEGLSNYSIIDKLVNIVDDLVECVKENSSKDLKKSFKSPEPRLFTPEEFFRIFNRSIDAFKDFVVASETSDCVVS

SEQ ID NO: 502 - protein, 141 aa, Homo sapiens
EGICRNRVTNNVKDVTKLVANLPKDYMITLNYVPGMDVLPSHCWISEMVVQLSDSLTDLLDKFSNISEGLSNYSIIDKLVNIVDDLVECVKENSSKDLKKSFKSPEPRLFTPEEFFRIFNRSIDAFKDFVVASETSDCVVS

SEQ ID NO: 503 - protein, 141 aa, Homo sapiens
EGICRNRVTNNVKDVTKLVANLPKDYMITLKYVSGMDVLPSHCWISEMVVQLSDSLTDLLDKFSNISEGLSNYSIIDKLVNIVDDLVECVKENSSKDLKKSFKSPEPRLFTPEEFFRIFNRSIDAFKDFVVASETSDCVVS

SEQ ID NO: 504 - protein, 141 aa, Homo sapiens
EGICRNRVTNNVKDVTKLVANLPKDYMITLKYVAGMDVLPSHCWISEMVVQLSDSLTDLLDKFSNISEGLSNYSIIDKLVNIVDDLVECVKENSSKDLKKSFKSPEPRLFTPEEFFRIFNRSIDAFKDFVVASETSDCVVS

SEQ ID NO: 505 - protein, 141 aa, Homo sapiens
EGICRNRVTNNVKDVTKLVANLPKDYMITLKYVPGMQVLPSHCWISEMVVQLSDSLTDLLDKFSNISEGLSNYSIIDKLVNIVDDLVECVKENSSKDLKKSFKSPEPRLFTPEEFFRIFNRSIDAFKDFVVASETSDCVVS

SEQ ID NO: 506 - protein, 141 aa, Homo sapiens
EGICRNRVTNNVKDVTKLVANLPKDYMITLKYVPGMNVLPSHCWISEMVVQLSDSLTDLLDKFSNISEGLSNYSIIDKLVNIVDDLVECVKENSSKDLKKSFKSPEPRLFTPEEFFRIFNRSIDAFKDFVVASETSDCVVS

SEQ ID NO: 507 - protein, 141 aa, Homo sapiens
EGICRNRVTNNVKDVTKLVANLPKDYMITLKYVPGMDVLPSHCWISEMVVQLSQSLTDLLDKFSNISEGLSNYSIIDKLVNIVDDLVECVKENSSKDLKKSFKSPEPRLFTPEEFFRIFNRSIDAFKDFVVASETSDCVVS

SEQ ID NO: 508 - protein, 141 aa, Homo sapiens
EGICRNRVTNNVKDVTKLVANLPKDYMITLKYVPGMDVLPSHCWISEMVVQLSNSLTDLLDKFSNISEGLSNYSIIDKLVNIVDDLVECVKENSSKDLKKSFKSPEPRLFTPEEFFRIFNRSIDAFKDFVVASETSDCVVS

SEQ ID NO: 509 - protein, 141 aa, Homo sapiens
EGICRNRVTNNVKDVTKLVANLPKDYMITLKYVPGMDVLPSHCWISEMVVQLSDSLTQLLDKFSNISEGLSNYSIIDKLVNIVDDLVECVKENSSKDLKKSFKSPEPRLFTPEEFFRIFNRSIDAFKDFVVASETSDCVVS

SEQ ID NO: 510 - protein, 141 aa, Homo sapiens
EGICRNRVTNNVKDVTKLVANLPKDYMITLKYVPGMDVLPSHCWISEMVVQLSDSLTNLLDKFSNISEGLSNYSIIDKLVNIVDDLVECVKENSSKDLKKSFKSPEPRLFTPEEFFRIFNRSIDAFKDFVVASETSDCVVS

SEQ ID NO: 511 - protein, 141 aa, Homo sapiens
EGICRNRVTNNVKDVTKLVANLPKDYMITLKYVPGMDVLPSHCWISEMVVQLSDSLTDLLQKFSNISEGLSNYSIIDKLVNIVDDLVECVKENSSKDLKKSFKSPEPRLFTPEEFFRIFNRSIDAFKDFVVASETSDCVVS

SEQ ID NO: 512 - protein, 141 aa, Homo sapiens
EGICRNRVTNNVKDVTKLVANLPKDYMITLKYVPGMDVLPSHCWISEMVVQLSDSLTDLLNKFSNISEGLSNYSIIDKLVNIVDDLVECVKENSSKDLKKSFKSPEPRLFTPEEFFRIFNRSIDAFKDFVVASETSDCVVS

SEQ ID NO: 513 - protein, 141 aa, Homo sapiens
EGICRNRVTNNVKDVTKLVANLPKDYMITLKYVPGMDVLPSHCWISEMVVQLSDSLTDLLDQFSNISEGLSNYSIIDKLVNIVDDLVECVKENSSKDLKKSFKSPEPRLFTPEEFFRIFNRSIDAFKDFVVASETSDCVVS

SEQ ID NO: 514 - protein, 141 aa, Homo sapiens
EGICRNRVTNNVKDVTKLVANLPKDYMITLKYVPGMDVLPSHCWISEMVVQLSDSLTDLLDNFSNISEGLSNYSIIDKLVNIVDDLVECVKENSSKDLKKSFKSPEPRLFTPEEFFRIFNRSIDAFKDFVVASETSDCVVS

SEQ ID NO: 515 - protein, 141 aa, Homo sapiens
EGICRNRVTNNVKDVTKLVANLPKDYMITLKYVPGMDVLPSHCWISEMVVQLSDSLTDLLDKISNISEGLSNYSIIDKLVNIVDDLVECVKENSSKDLKKSFKSPEPRLFTPEEFFRIFNRSIDAFKDFVVASETSDCVVS

SEQ ID NO: 516 - protein, 141 aa, Homo sapiens
EGICRNRVTNNVKDVTKLVANLPKDYMITLKYVPGMDVLPSHCWISEMVVQLSDSLTDLLDKVSNISEGLSNYSIIDKLVNIVDDLVECVKENSSKDLKKSFKSPEPRLFTPEEFFRIFNRSIDAFKDFVVASETSDCVVS

SEQ ID NO: 517 - protein, 141 aa, Homo sapiens
EGICRNRVTNNVKDVTKLVANLPKDYMITLKYVPGMDVLPSHCWISEMVVQLSDSLTDLLDKFSNISEGLSNYSIIDKLVNIVDDLVECVKENSSQDLKKSFKSPEPRLFTPEEFFRIFNRSIDAFKDFVVASETSDCVVS

SEQ ID NO: 518 - protein, 141 aa, Homo sapiens
EGICRNRVTNNVKDVTKLVANLPKDYMITLKYVPGMDVLPSHCWISEMVVQLSDSLTDLLDKFSNISEGLSNYSIIDKLVNIVDDLVECVKENSSNDLKKSFKSPEPRLFTPEEFFRIFNRSIDAFKDFVVASETSDCVVS

SEQ ID NO: 519 - protein, 141 aa, Homo sapiens
EGICRNRVTNNVKDVTKLVANLPKDYMITLKYVPGMDVLPSHCWISEMVVQLSDSLTDLLDKFSNISEGLSNYSIIDKLVNIVDDLVECVKENSSKDVKKSFKSPEPRLFTPEEFFRIFNRSIDAFKDFVVASETSDCVVS

SEQ ID NO: 520 - protein, 141 aa, Homo sapiens
EGICRNRVTNNVKDVTKLVANLPKDYMITLKYVPGMDVLPSHCWISEMVVQLSDSLTDLLDKFSNISEGLSNYSIIDKLVNIVDDLVECVKENSSKDIKKSFKSPEPRLFTPEEFFRIFNRSIDAFKDFVVASETSDCVVS

SEQ ID NO: 521 - protein, 141 aa, Homo sapiens
EGICRNRVTNNVKDVTKLVANLPKDYMITLKYVPGMDVLPSHCWISEMVVQLSDSLTDLLDKFSNISEGLSNYSIIDKLVNIVDDLVECVKENSSKDLQKSFKSPEPRLFTPEEFFRIFNRSIDAFKDFVVASETSDCVVS

SEQ ID NO: 522 - protein, 141 aa, Homo sapiens
EGICRNRVTNNVKDVTKLVANLPKDYMITLKYVPGMDVLPSHCWISEMVVQLSDSLTDLLDKFSNISEGLSNYSIIDKLVNIVDDLVECVKENSSKDLNKSFKSPEPRLFTPEEFFRIFNRSIDAFKDFVVASETSDCVVS

SEQ ID NO: 523 - protein, 141 aa, Homo sapiens
EGICRNRVTNNVKDVTKLVANLPKDYMITLKYVPGMDVLPSHCWISEMVVQLSDSLTDLLDKFSNISEGLSNYSIIDKLVNIVDDLVECVKENSSKDLKQSFKSPEPRLFTPEEFFRIFNRSIDAFKDFVVASETSDCVVS

SEQ ID NO: 524 - protein, 141 aa, Homo sapiens
EGICRNRVTNNVKDVTKLVANLPKDYMITLKYVPGMDVLPSHCWISEMVVQLSDSLTDLLDKFSNISEGLSNYSIIDKLVNIVDDLVECVKENSSKDLKNSFKSPEPRLFTPEEFFRIFNRSIDAFKDFVVASETSDCVVS

SEQ ID NO: 525 - protein, 141 aa, Homo sapiens
EGICRNRVTNNVKDVTKLVANLPKDYMITLKYVPGMDVLPSHCWISEMVVQLSDSLTDLLDKFSNISEGLSNYSIIDKLVNIVDDLVECVKENSSKDLKKSIKSPEPRLFTPEEFFRIFNRSIDAFKDFVVASETSDCVVS

SEQ ID NO: 526 - protein, 141 aa, Homo sapiens
EGICRNRVTNNVKDVTKLVANLPKDYMITLKYVPGMDVLPSHCWISEMVVQLSDSLTDLLDKFSNISEGLSNYSIIDKLVNIVDDLVECVKENSSKDLKKSVKSPEPRLFTPEEFFRIFNRSIDAFKDFVVASETSDCVVS

SEQ ID NO: 527 - protein, 141 aa, Homo sapiens
EGICRNRVTNNVKDVTKLVANLPKDYMITLKYVPGMDVLPSHCWISEMVVQLSDSLTDLLDKFSNISEGLSNYSIIDKLVNIVDDLVECVKENSSKDLKKSFQSPEPRLFTPEEFFRIFNRSIDAFKDFVVASETSDCVVS

SEQ ID NO: 528 - protein, 141 aa, Homo sapiens
EGICRNRVTNNVKDVTKLVANLPKDYMITLKYVPGMDVLPSHCWISEMVVQLSDSLTDLLDKFSNISEGLSNYSIIDKLVNIVDDLVECVKENSSKDLKKSFNSPEPRLFTPEEFFRIFNRSIDAFKDFVVASETSDCVVS

SEQ ID NO: 529 - protein, 141 aa, Homo sapiens
EGICRNRVTNNVKDVTKLVANLPKDYMITLKYVPGMDVLPSHCWISEMVVQLSDSLTDLLDKFSNISEGLSNYSIIDKLVNIVDDLVECVKENSSKDLKKSFKSPQPRLFTPEEFFRIFNRSIDAFKDFVVASETSDCVVS

SEQ ID NO: 530 - protein, 141 aa, Homo sapiens
EGICRNRVTNNVKDVTKLVANLPKDYMITLKYVPGMDVLPSHCWISEMVVQLSDSLTDLLDKFSNISEGLSNYSIIDKLVNIVDDLVECVKENSSKDLKKSFKSPNPRLFTPEEFFRIFNRSIDAFKDFVVASETSDCVVS

SEQ ID NO: 531 - protein, 141 aa, Homo sapiens
EGICRNRVTNNVKDVTKLVANLPKDYMITLKYVPGMDVLPSHCWISEMVVQLSDSLTDLLDKFSNISEGLSNYSIIDKLVNIVDDLVECVKENSSKDLKKSFKSPHPRLFTPEEFFRIFNRSIDAFKDFVVASETSDCVVS

SEQ ID NO: 532 - protein, 141 aa, Homo sapiens
EGICRNRVTNNVKDVTKLVANLPKDYMITLKYVPGMDVLPSHCWISEMVVQLSDSLTDLLDKFSNISEGLSNYSIIDKLVNIVDDLVECVKENSSKDLKKSFKSPESRLFTPEEFFRIFNRSIDAFKDFVVASETSDCVVS

SEQ ID NO: 533 - protein, 141 aa, Homo sapiens
EGICRNRVTNNVKDVTKLVANLPKDYMITLKYVPGMDVLPSHCWISEMVVQLSDSLTDLLDKFSNISEGLSNYSIIDKLVNIVDDLVECVKENSSKDLKKSFKSPEARLFTPEEFFRIFNRSIDAFKDFVVASETSDCVVS

SEQ ID NO: 534 - protein, 141 aa, Homo sapiens
EGICRNRVTNNVKDVTKLVANLPKDYMITLKYVPGMDVLPSHCWISEMVVQLSDSLTDLLDKFSNISEGLSNYSIIDKLVNIVDDLVECVKENSSKDLKKSFKSPEPHLFTPEEFFRIFNRSIDAFKDFVVASETSDCVVS

SEQ ID NO: 535 - protein, 141 aa, Homo sapiens
EGICRNRVTNNVKDVTKLVANLPKDYMITLKYVPGMDVLPSHCWISEMVVQLSDSLTDLLDKFSNISEGLSNYSIIDKLVNIVDDLVECVKENSSKDLKKSFKSPEPQLFTPEEFFRIFNRSIDAFKDFVVASETSDCVVS

SEQ ID NO: 536 - protein, 141 aa, Homo sapiens
EGICRNRVTNNVKDVTKLVANLPKDYMITLKYVPGMDVLPSHCWISEMVVQLSDSLTDLLDKFSNISEGLSNYSIIDKLVNIVDDLVECVKENSSKDLKKSFKSPEPRVFTPEEFFRIFNRSIDAFKDFVVASETSDCVVS

SEQ ID NO: 537 - protein, 141 aa, Homo sapiens
EGICRNRVTNNVKDVTKLVANLPKDYMITLKYVPGMDVLPSHCWISEMVVQLSDSLTDLLDKFSNISEGLSNYSIIDKLVNIVDDLVECVKENSSKDLKKSFKSPEPRIFTPEEFFRIFNRSIDAFKDFVVASETSDCVVS

SEQ ID NO: 538 - protein, 141 aa, Homo sapiens
EGICRNRVTNNVKDVTKLVANLPKDYMITLKYVPGMDVLPSHCWISEMVVQLSDSLTDLLDKFSNISEGLSNYSIIDKLVNIVDDLVECVKENSSKDLKKSFKSPEPRLFTPEEFFRIFNRSIDAFKDFVVASQTSDCVVS

SEQ ID NO: 539 - protein, 141 aa, Homo sapiens
EGICRNRVTNNVKDVTKLVANLPKDYMITLKYVPGMDVLPSHCWISEMVVQLSDSLTDLLDKFSNISEGLSNYSIIDKLVNIVDDLVECVKENSSKDLKKSFKSPEPRLFTPEEFFRIFNRSIDAFKDFVVASNTSDCVVS

SEQ ID NO: 540 - protein, 141 aa, Homo sapiens
EGICRNRVTNNVKDVTKLVANLPKDYMITLKYVPGMDVLPSHCWISEMVVQLSDSLTDLLDKFSNISEGLSNYSIIDKLVNIVDDLVECVKENSSKDLKKSFKSPEPRLFTPEEFFRIFNRSIDAFKDFVVASHTSDCVVS

SEQ ID NO: 541 - protein, 141 aa, Homo sapiens
EGICRNRVTNNVKDVTKLVANLPKDYMITLKYVPGMDVLPSHCWISEMVVQLSDSLTDLLDKFSNISEGLSNYSIIDKLVNIVDDLVECVKENSSKDLKKSFKSPEPRLFTPEEFFRIFNRSIDAFKDFVVASETSQCVVS

SEQ ID NO: 542 - protein, 141 aa, Homo sapiens
EGICRNRVTNNVKDVTKLVANLPKDYMITLKYVPGMDVLPSHCWISEMVVQLSDSLTDLLDKFSNISEGLSNYSIIDKLVNIVDDLVECVKENSSKDLKKSFKSPEPRLFTPEEFFRIFNRSIDAFKDFVVASETSNCVVS

SEQ ID NO: 543 - protein, 129 aa, Homo sapiens
HKCDITLQEIIKTLNSLTEQKTLCTQLTVTDIFAASKNTTEKETFCRAATVLRQFYSHHEKDTRCLGATAQQFHRHKQLIRFLKRLDRNLWGLAGLNSCPVKEANQSTLENFLERLKTIMREKYSKCSS

SEQ ID NO: 544 - protein, 129 aa, Homo sapiens
HKCDITLQEIIKTLNSLTEQKTLCTNLTVTDIFAASKNTTEKETFCRAATVLRQFYSHHEKDTRCLGATAQQFHRHKQLIRFLKRLDRNLWGLAGLNSCPVKEANQSTLENFLERLKTIMREKYSKCSS

SEQ ID NO: 545 - protein, 129 aa, Homo sapiens
HKCDITLQEIIKTLNSLTEQKTLCTHLTVTDIFAASKNTTEKETFCRAATVLRQFYSHHEKDTRCLGATAQQFHRHKQLIRFLKRLDRNLWGLAGLNSCPVKEANQSTLENFLERLKTIMREKYSKCSS

SEQ ID NO: 546 - protein, 129 aa, Homo sapiens
HKCDITLQEIIKTLNSLTEQKTLCTELTVTDIFAASQNTTEKETFCRAATVLRQFYSHHEKDTRCLGATAQQFHRHKQLIRFLKRLDRNLWGLAGLNSCPVKEANQSTLENFLERLKTIMREKYSKCSS

SEQ ID NO: 547 - protein, 129 aa, Homo sapiens
HKCDITLQEIIKTLNSLTEQKTLCTELTVTDIFAASNNTTEKETFCRAATVLRQFYSHHEKDTRCLGATAQQFHRHKQLIRFLKRLDRNLWGLAGLNSCPVKEANQSTLENFLERLKTIMREKYSKCSS

SEQ ID NO: 548 - protein, 129 aa, Homo sapiens
HKCDITLQEIIKTLNSLTEQKTLCTELTVTDIFAASKNTTEKETFCRAATVLHQFYSHHEKDTRCLGATAQQFHRHKQLIRFLKRLDRNLWGLAGLNSCPVKEANQSTLENFLERLKTIMREKYSKCSS

SEQ ID NO: 549 - protein, 129 aa, Homo sapiens
HKCDITLQEIIKTLNSLTEQKTLCTELTVTDIFAASKNTTEKETFCRAATVLQQFYSHHEKDTRCLGATAQQFHRHKQLIRFLKRLDRNLWGLAGLNSCPVKEANQSTLENFLERLKTIMREKYSKCSS

SEQ ID NO: 550 - protein, 129 aa, Homo sapiens
HKCDITLQEIIKTLNSLTEQKTLCTELTVTDIFAASKNTTEKETFCRAATVLRQFYSHHQKDTRCLGATAQQFHRHKQLIRFLKRLDRNLWGLAGLNSCPVKEANQSTLENFLERLKTIMREKYSKCSS

SEQ ID NO: 551 - protein, 129 aa, Homo sapiens
HKCDITLQEIIKTLNSLTEQKTLCTELTVTDIFAASKNTTEKETFCRAATVLRQFYSHHNKDTRCLGATAQQFHRHKQLIRFLKRLDRNLWGLAGLNSCPVKEANQSTLENFLERLKTIMREKYSKCSS

SEQ ID NO: 552 - protein, 129 aa, Homo sapiens
HKCDITLQEIIKTLNSLTEQKTLCTELTVTDIFAASKNTTEKETFCRAATVLRQFYSHHHKDTRCLGATAQQFHRHKQLIRFLKRLDRNLWGLAGLNSCPVKEANQSTLENFLERLKTIMREKYSKCSS

SEQ ID NO: 553 - protein, 129 aa, Homo sapiens
HKCDITLQEIIKTLNSLTEQKTLCTELTVTDIFAASKNTTEKETFCRAATVLRQFYSHHEQDTRCLGATAQQFHRHKQLIRFLKRLDRNLWGLAGLNSCPVKEANQSTLENFLERLKTIMREKYSKCSS

SEQ ID NO: 554 - protein, 129 aa, Homo sapiens
HKCDITLQEIIKTLNSLTEQKTLCTELTVTDIFAASKNTTEKETFCRAATVLRQFYSHHENDTRCLGATAQQFHRHKQLIRFLKRLDRNLWGLAGLNSCPVKEANQSTLENFLERLKTIMREKYSKCSS

SEQ ID NO: 555 - protein, 129 aa, Homo sapiens
HKCDITLQEIIKTLNSLTEQKTLCTELTVTDIFAASKNTTEKETFCRAATVLRQFYSHHEKDTHCLGATAQQFHRHKQLIRFLKRLDRNLWGLAGLNSCPVKEANQSTLENFLERLKTIMREKYSKCSS

SEQ ID NO: 556 - protein, 129 aa, Homo sapiens
HKCDITLQEIIKTLNSLTEQKTLCTELTVTDIFAASKNTTEKETFCRAATVLRQFYSHHEKDTQCLGATAQQFHRHKQLIRFLKRLDRNLWGLAGLNSCPVKEANQSTLENFLERLKTIMREKYSKCSS

SEQ ID NO: 557 - protein, 129 aa, Homo sapiens
HKCDITLQEIIKTLNSLTEQKTLCTELTVTDIFAASKNTTEKETFCRAATVLRQFYSHHEKDTRCVGATAQQFHRHKQLIRFLKRLDRNLWGLAGLNSCPVKEANQSTLENFLERLKTIMREKYSKCSS

SEQ ID NO: 558 - protein, 129 aa, Homo sapiens
HKCDITLQEIIKTLNSLTEQKTLCTELTVTDIFAASKNTTEKETFCRAATVLRQFYSHHEKDTRCIGATAQQFHRHKQLIRFLKRLDRNLWGLAGLNSCPVKEANQSTLENFLERLKTIMREKYSKCSS

SEQ ID NO: 559 - protein, 129 aa, Homo sapiens
HKCDITLQEIIKTLNSLTEQKTLCTELTVTDIFAASKNTTEKETFCRAATVLRQFYSHHEKDTRCLGATAQQFHRHKQLIRFLKRLDRNLWGLAGLNSCSVKEANQSTLENFLERLKTIMREKYSKCSS

SEQ ID NO: 560 - protein, 129 aa, Homo sapiens
HKCDITLQEIIKTLNSLTEQKTLCTELTVTDIFAASKNTTEKETFCRAATVLRQFYSHHEKDTRCLGATAQQFHRHKQLIRFLKRLDRNLWGLAGLNSCAVKEANQSTLENFLERLKTIMREKYSKCSS

SEQ ID NO: 561 - protein, 129 aa, Homo sapiens
HKCDITLQEIIKTLNSLTEQKTLCTELTVTDIFAASKNTTEKETFCRAATVLRQFYSHHEKDTRCLGATAQQFHRHKQLIRFLKRLDRNLWGLAGLNSCPVQEANQSTLENFLERLKTIMREKYSKCSS

SEQ ID NO: 562 - protein, 129 aa, Homo sapiens
HKCDITLQEIIKTLNSLTEQKTLCTELTVTDIFAASKNTTEKETFCRAATVLRQFYSHHEKDTRCLGATAQQFHRHKQLIRFLKRLDRNLWGLAGLNSCPVNEANQSTLENFLERLKTIMREKYSKCSS

SEQ ID NO: 563 - protein, 129 aa, Homo sapiens
HKCDITLQEIIKTLNSLTEQKTLCTELTVTDIFAASKNTTEKETFCRAATVLRQFYSHHEKDTRCLGATAQQFHRHKQLIRFLKRLDRNLWGLAGLNSCPVKQANQSTLENFLERLKTIMREKYSKCSS

SEQ ID NO: 564 - protein, 129 aa, Homo sapiens
HKCDITLQEIIKTLNSLTEQKTLCTELTVTDIFAASKNTTEKETFCRAATVLRQFYSHHEKDTRCLGATAQQFHRHKQLIRFLKRLDRNLWGLAGLNSCPVKNANQSTLENFLERLKTIMREKYSKCSS

SEQ ID NO: 565 - protein, 129 aa, Homo sapiens
HKCDITLQEIIKTLNSLTEQKTLCTELTVTDIFAASKNTTEKETFCRAATVLRQFYSHHEKDTRCLGATAQQFHRHKQLIRFLKRLDRNLWGLAGLNSCPVKHANQSTLENFLERLKTIMREKYSKCSS

SEQ ID NO: 566 - protein, 129 aa, Homo sapiens
HKCDITLQEIIKTLNSLTEQKTLCTELTVTDIFAASKNTTEKETFCRAATVLRQFYSHHEKDTRCLGATAQQFHRHKQLIRFLKRLDRNLWGLAGLNSCPVKEANQSTLENFLERLKTIMREKYSQCSS

SEQ ID NO: 567 - protein, 129 aa, Homo sapiens
HKCDITLQEIIKTLNSLTEQKTLCTELTVTDIFAASKNTTEKETFCRAATVLRQFYSHHEKDTRCLGATAQQFHRHKQLIRFLKRLDRNLWGLAGLNSCPVKEANQSTLENFLERLKTIMREKYSNCSS

SEQ ID NO: 568 - protein, 115 aa, Homo sapiens
IPTEIPTSALVKETLALLSTHRTLLIANETLHIPVPVHKNHQLCTEEIFQGIGTLESQTVQGGTVERLFKNLSLIKKYIDGQKKKCGEERRRVNQFLDYLQEFLGVMNTEWIIES

SEQ ID NO: 569 - protein, 115 aa, Homo sapiens
IPTEIPTSALVKETLALLSTHRTLLIANETLQIPVPVHKNHQLCTEEIFQGIGTLESQTVQGGTVERLFKNLSLIKKYIDGQKKKCGEERRRVNQFLDYLQEFLGVMNTEWIIES

SEQ ID NO: 570 - protein, 115 aa, Homo sapiens
IPTEIPTSALVKETLALLSTHRTLLIANETLRISVPVHKNHQLCTEEIFQGIGTLESQTVQGGTVERLFKNLSLIKKYIDGQKKKCGEERRRVNQFLDYLQEFLGVMNTEWIIES

SEQ ID NO: 571 - protein, 115 aa, Homo sapiens
IPTEIPTSALVKETLALLSTHRTLLIANETLRIAVPVHKNHQLCTEEIFQGIGTLESQTVQGGTVERLFKNLSLIKKYIDGQKKKCGEERRRVNQFLDYLQEFLGVMNTEWIIES

SEQ ID NO: 572 - protein, 115 aa, Homo sapiens
IPTEIPTSALVKETLALLSTHRTLLIANETLRIPVPVHQNHQLCTEEIFQGIGTLESQTVQGGTVERLFKNLSLIKKYIDGQKKKCGEERRRVNQFLDYLQEFLGVMNTEWIIES

SEQ ID NO: 573 - protein, 115 aa, Homo sapiens
IPTEIPTSALVKETLALLSTHRTLLIANETLRIPVPVHNNHQLCTEEIFQGIGTLESQTVQGGTVERLFKNLSLIKKYIDGQKKKCGEERRRVNQFLDYLQEFLGVMNTEWIIES

SEQ ID NO: 574 - protein, 115 aa, Homo sapiens
IPTEIPTSALVKETLALLSTHRTLLIANETLRIPVPVHKNHQLCTQEIFQGIGTLESQTVQGGTVERLFKNLSLIKKYIDGQKKKCGEERRRVNQFLDYLQEFLGVMNTEWIIES

SEQ ID NO: 575 - protein, 115 aa, Homo sapiens
IPTEIPTSALVKETLALLSTHRTLLIANETLRIPVPVHKNHQLCTNEIFQGIGTLESQTVQGGTVERLFKNLSLIKKYIDGQKKKCGEERRRVNQFLDYLQEFLGVMNTEWIIES

SEQ ID NO: 576 - protein, 115 aa, Homo sapiens
IPTEIPTSALVKETLALLSTHRTLLIANETLRIPVPVHKNHQLCTHEIFQGIGTLESQTVQGGTVERLFKNLSLIKKYIDGQKKKCGEERRRVNQFLDYLQEFLGVMNTEWIIES

SEQ ID NO: 577 - protein, 115 aa, Homo sapiens
IPTEIPTSALVKETLALLSTHRTLLIANETLRIPVPVHKNHQLCTEQIFQGIGTLESQTVQGGTVERLFKNLSLIKKYIDGQKKKCGEERRRVNQFLDYLQEFLGVMNTEWIIES

SEQ ID NO: 578 - protein, 115 aa, Homo sapiens
IPTEIPTSALVKETLALLSTHRTLLIANETLRIPVPVHKNHQLCTENIFQGIGTLESQTVQGGTVERLFKNLSLIKKYIDGQKKKCGEERRRVNQFLDYLQEFLGVMNTEWIIES

SEQ ID NO: 579 - protein, 115 aa, Homo sapiens
IPTEIPTSALVKETLALLSTHRTLLIANETLRIPVPVHKNHQLCTEHIFQGIGTLESQTVQGGTVERLFKNLSLIKKYIDGQKKKCGEERRRVNQFLDYLQEFLGVMNTEWIIES

SEQ ID NO: 580 - protein, 115 aa, Homo sapiens
IPTEIPTSALVKETLALLSTHRTLLIANETLRIPVPVHKNHQLCTEEIFQGIGTLQSQTVQGGTVERLFKNLSLIKKYIDGQKKKCGEERRRVNQFLDYLQEFLGVMNTEWIIES

SEQ ID NO: 581 - protein, 115 aa, Homo sapiens
IPTEIPTSALVKETLALLSTHRTLLIANETLRIPVPVHKNHQLCTEEIFQGIGTLNSQTVQGGTVERLFKNLSLIKKYIDGQKKKCGEERRRVNQFLDYLQEFLGVMNTEWIIES

SEQ ID NO: 582 - protein, 115 aa, Homo sapiens
IPTEIPTSALVKETLALLSTHRTLLIANETLRIPVPVHKNHQLCTEEIFQGIGTLHSQTVQGGTVERLFKNLSLIKKYIDGQKKKCGEERRRVNQFLDYLQEFLGVMNTEWIIES

SEQ ID NO: 583 - protein, 115 aa, Homo sapiens
IPTEIPTSALVKETLALLSTHRTLLIANETLRIPVPVHKNHQLCTEEIFQGIGTLESQTVQGGTVERLFKNLSLIKKYIDGQKQKCGEERRRVNQFLDYLQEFLGVMNTEWIIES

SEQ ID NO: 584 - protein, 115 aa, Homo sapiens
IPTEIPTSALVKETLALLSTHRTLLIANETLRIPVPVHKNHQLCTEEIFQGIGTLESQTVQGGTVERLFKNLSLIKKYIDGQKNKCGEERRRVNQFLDYLQEFLGVMNTEWIIES

SEQ ID NO: 585 - protein, 115 aa, Homo sapiens
IPTEIPTSALVKETLALLSTHRTLLIANETLRIPVPVHKNHQLCTEEIFQGIGTLESQTVQGGTVERLFKNLSLIKKYIDGQKKQCGEERRRVNQFLDYLQEFLGVMNTEWIIES

SEQ ID NO: 586 - protein, 115 aa, Homo sapiens
IPTEIPTSALVKETLALLSTHRTLLIANETLRIPVPVHKNHQLCTEEIFQGIGTLESQTVQGGTVERLFKNLSLIKKYIDGQKKNCGEERRRVNQFLDYLQEFLGVMNTEWIIES

SEQ ID NO: 587 - protein, 115 aa, Homo sapiens
IPTEIPTSALVKETLALLSTHRTLLIANETLRIPVPVHKNHQLCTEEIFQGIGTLESQTVQGGTVERLFKNLSLIKKYIDGQKKKCGQERRRVNQFLDYLQEFLGVMNTEWIIES

SEQ ID NO: 588 - protein, 115 aa, Homo sapiens
IPTEIPTSALVKETLALLSTHRTLLIANETLRIPVPVHKNHQLCTEEIFQGIGTLESQTVQGGTVERLFKNLSLIKKYIDGQKKKCGNERRRVNQFLDYLQEFLGVMNTEWIIES

SEQ ID NO: 589 - protein, 115 aa, Homo sapiens
IPTEIPTSALVKETLALLSTHRTLLIANETLRIPVPVHKNHQLCTEEIFQGIGTLESQTVQGGTVERLFKNLSLIKKYIDGQKKKCGHERRRVNQFLDYLQEFLGVMNTEWIIES

SEQ ID NO: 590 - protein, 115 aa, Homo sapiens
IPTEIPTSALVKETLALLSTHRTLLIANETLRIPVPVHKNHQLCTEEIFQGIGTLESQTVQGGTVERLFKNLSLIKKYIDGQKKKCGEQRRRVNQFLDYLQEFLGVMNTEWIIES

SEQ ID NO: 591 - protein, 115 aa, Homo sapiens
IPTEIPTSALVKETLALLSTHRTLLIANETLRIPVPVHKNHQLCTEEIFQGIGTLESQTVQGGTVERLFKNLSLIKKYIDGQKKKCGENRRRVNQFLDYLQEFLGVMNTEWIIES

SEQ ID NO: 592 - protein, 115 aa, Homo sapiens
IPTEIPTSALVKETLALLSTHRTLLIANETLRIPVPVHKNHQLCTEEIFQGIGTLESQTVQGGTVERLFKNLSLIKKYIDGQKKKCGEHRRRVNQFLDYLQEFLGVMNTEWIIES

SEQ ID NO: 593 - protein, 115 aa, Homo sapiens
IPTEIPTSALVKETLALLSTHRTLLIANETLRIPVPVHKNHQLCTEEIFQGIGTLESQTVQGGTVERLFKNLSLIKKYIDGQKKKCGEEHRRVNQFLDYLQEFLGVMNTEWIIES

SEQ ID NO: 594 - protein, 115 aa, Homo sapiens
IPTEIPTSALVKETLALLSTHRTLLIANETLRIPVPVHKNHQLCTEEIFQGIGTLESQTVQGGTVERLFKNLSLIKKYIDGQKKKCGEEQRRVNQFLDYLQEFLGVMNTEWIIES

SEQ ID NO: 595 - protein, 115 aa, Homo sapiens
IPTEIPTSALVKETLALLSTHRTLLIANETLRIPVPVHKNHQLCTEEIFQGIGTLESQTVQGGTVERLFKNLSLIKKYIDGQKKKCGEERRRVNQFLDYLQQFLGVMNTEWIIES

SEQ ID NO: 596 - protein, 115 aa, Homo sapiens
IPTEIPTSALVKETLALLSTHRTLLIANETLRIPVPVHKNHQLCTEEIFQGIGTLESQTVQGGTVERLFKNLSLIKKYIDGQKKKCGEERRRVNQFLDYLQNFLGVMNTEWIIES

SEQ ID NO: 597 - protein, 115 aa, Homo sapiens
IPTEIPTSALVKETLALLSTHRTLLIANETLRIPVPVHKNHQLCTEEIFQGIGTLESQTVQGGTVERLFKNLSLIKKYIDGQKKKCGEERRRVNQFLDYLQHFLGVMNTEWIIES

SEQ ID NO: 598 - protein, 115 aa, Homo sapiens
IPTEIPTSALVKETLALLSTHRTLLIANETLRIPVPVHKNHQLCTEEIFQGIGTLESQTVQGGTVERLFKNLSLIKKYIDGQKKKCGEERRRVNQFLDYLQEFLGVMNTQWIIES

SEQ ID NO: 599 - protein, 115 aa, Homo sapiens
IPTEIPTSALVKETLALLSTHRTLLIANETLRIPVPVHKNHQLCTEEIFQGIGTLESQTVQGGTVERLFKNLSLIKKYIDGQKKKCGEERRRVNQFLDYLQEFLGVMNTNWIIES

SEQ ID NO: 600 - protein, 115 aa, Homo sapiens
IPTEIPTSALVKETLALLSTHRTLLIANETLRIPVPVHKNHQLCTEEIFQGIGTLESQTVQGGTVERLFKNLSLIKKYIDGQKKKCGEERRRVNQFLDYLQEFLGVMNTHWIIES

SEQ ID NO: 601 - protein, 115 aa, Homo sapiens
IPTEIPTSALVKETLALLSTHRTLLIANETLRIPVPVHKNHQLCTEEIFQGIGTLESQTVQGGTVERLFKNLSLIKKYIDGQKKKCGEERRRVNQFLDYLQEFLGVMNTESIIES

SEQ ID NO: 602 - protein, 115 aa, Homo sapiens
IPTEIPTSALVKETLALLSTHRTLLIANETLRIPVPVHKNHQLCTEEIFQGIGTLESQTVQGGTVERLFKNLSLIKKYIDGQKKKCGEERRRVNQFLDYLQEFLGVMNTEHIIES

SEQ ID NO: 603 - protein, 112 aa, homo sapiens
GPVPPSTALRELIEELVNITQNQKAPLCNGSVVWSINLTAGMYCAALESLINVSGCSAIEKTQRMLSGFCPHKVSAGQFSSLHVRDTKIEVAQFVKDLLLHLKKLFREGRFN

SEQ ID NO: 604 - protein, 112 aa, homo sapiens
GPVPPSTALRELIEELVNITQNQKAPLCNGSIVWSINLTAGMYCAALESLINVSGCSAIEKTQRMLSGFCPHKVSAGQFSSLHVRDTKIEVAQFVKDLLLHLKKLFREGRFN

SEQ ID NO: 605 - protein, 112 aa, homo sapiens
GPVPPSTALRELIEELVNITQNQKAPLCNGSMVSSINLTAGMYCAALESLINVSGCSAIEKTQRMLSGFCPHKVSAGQFSSLHVRDTKIEVAQFVKDLLLHLKKLFREGRFN

SEQ ID NO: 606 - protein, 112 aa, homo sapiens
GPVPPSTALRELIEELVNITQNQKAPLCNGSMVHSINLTAGMYCAALESLINVSGCSAIEKTQRMLSGFCPHKVSAGQFSSLHVRDTKIEVAQFVKDLLLHLKKLFREGRFN

SEQ ID NO: 607 - protein, 112 aa, homo sapiens
GPVPPSTALRELIEELVNITQNQKAPLCNGSMVWSINVTAGMYCAALESLINVSGCSAIEKTQRMLSGFCPHKVSAGQFSSLHVRDTKIEVAQFVKDLLLHLKKLFREGRFN

SEQ ID NO: 608 - protein, 112 aa, homo sapiens
GPVPPSTALRELIEELVNITQNQKAPLCNGSMVWSINITAGMYCAALESLINVSGCSAIEKTQRMLSGFCPHKVSAGQFSSLHVRDTKIEVAQFVKDLLLHLKKLFREGRFN

SEQ ID NO: 609 - protein, 112 aa, homo sapiens
GPVPPSTALRELIEELVNITQNQKAPLCNGSMVWSINLTAGMYCAALQSLINVSGCSAIEKTQRMLSGFCPHKVSAGQFSSLHVRDTKIEVAQFVKDLLLHLKKLFREGRFN

SEQ ID NO: 610 - protein, 112 aa, homo sapiens
GPVPPSTALRELIEELVNITQNQKAPLCNGSMVWSINLTAGMYCAALNSLINVSGCSAIEKTQRMLSGFCPHKVSAGQFSSLHVRDTKIEVAQFVKDLLLHLKKLFREGRFN

SEQ ID NO: 611 - protein, 112 aa, homo sapiens
GPVPPSTALRELIEELVNITQNQKAPLCNGSMVWSINLTAGMYCAALHSLINVSGCSAIEKTQRMLSGFCPHKVSAGQFSSLHVRDTKIEVAQFVKDLLLHLKKLFREGRFN

SEQ ID NO: 612 - protein, 112 aa, homo sapiens
GPVPPSTALRELIEELVNITQNQKAPLCNGSMVWSINLTAGMYCAALESLINVSGCSAIEKTQRMLSGFCPHKVSAGQISSLHVRDTKIEVAQFVKDLLLHLKKLFREGRFN

SEQ ID NO: 613 - protein, 112 aa, homo sapiens
GPVPPSTALRELIEELVNITQNQKAPLCNGSMVWSINLTAGMYCAALESLINVSGCSAIEKTQRMLSGFCPHKVSAGQVSSLHVRDTKIEVAQFVKDLLLHLKKLFREGRFN

SEQ ID NO: 614 - protein, 112 aa, homo sapiens
GPVPPSTALRELIEELVNITQNQKAPLCNGSMVWSINLTAGMYCAALESLINVSGCSAIEKTQRMLSGFCPHKVSAGQFSSVHVRDTKIEVAQFVKDLLLHLKKLFREGRFN

SEQ ID NO: 615 - protein, 112 aa, homo sapiens
GPVPPSTALRELIEELVNITQNQKAPLCNGSMVWSINLTAGMYCAALESLINVSGCSAIEKTQRMLSGFCPHKVSAGQFSSIHVRDTKIEVAQFVKDLLLHLKKLFREGRFN

SEQ ID NO: 616 - protein, 112 aa, homo sapiens
GPVPPSTALRELIEELVNITQNQKAPLCNGSMVWSINLTAGMYCAALESLINVSGCSAIEKTQRMLSGFCPHKVSAGQFSSLHVHDTKIEVAQFVKDLLLHLKKLFREGRFN

SEQ ID NO: 617 - protein, 112 aa, homo sapiens
GPVPPSTALRELIEELVNITQNQKAPLCNGSMVWSINLTAGMYCAALESLINVSGCSAIEKTQRMLSGFCPHKVSAGQFSSLHVQDTKIEVAQFVKDLLLHLKKLFREGRFN

SEQ ID NO: 618 - protein, 112 aa, homo sapiens
GPVPPSTALRELIEELVNITQNQKAPLCNGSMVWSINLTAGMYCAALESLINVSGCSAIEKTQRMLSGFCPHKVSAGQFSSLHVRQTKIEVAQFVKDLLLHLKKLFREGRFN

SEQ ID NO: 619 - protein, 112 aa, homo sapiens
GPVPPSTALRELIEELVNITQNQKAPLCNGSMVWSINLTAGMYCAALESLINVSGCSAIEKTQRMLSGFCPHKVSAGQFSSLHVRNTKIEVAQFVKDLLLHLKKLFREGRFN

SEQ ID NO: 620 - protein, 112 aa, homo sapiens
GPVPPSTALRELIEELVNITQNQKAPLCNGSMVWSINLTAGMYCAALESLINVSGCSAIEKTQRMLSGFCPHKVSAGQFSSLHVRDTQIEVAQFVKDLLLHLKKLFREGRFN

SEQ ID NO: 621 - protein, 112 aa, homo sapiens
GPVPPSTALRELIEELVNITQNQKAPLCNGSMVWSINLTAGMYCAALESLINVSGCSAIEKTQRMLSGFCPHKVSAGQFSSLHVRDTNIEVAQFVKDLLLHLKKLFREGRFN

SEQ ID NO: 622 - protein, 112 aa, homo sapiens
GPVPPSTALRELIEELVNITQNQKAPLCNGSMVWSINLTAGMYCAALESLINVSGCSAIEKTQRMLSGFCPHKVSAGQFSSLHVRDTKIEVAQFVKDLLLHLKKLFHEGRFN

SEQ ID NO: 623 - protein, 112 aa, homo sapiens
GPVPPSTALRELIEELVNITQNQKAPLCNGSMVWSINLTAGMYCAALESLINVSGCSAIEKTQRMLSGFCPHKVSAGQFSSLHVRDTKIEVAQFVKDLLLHLKKLFQEGRFN

SEQ ID NO: 624 - protein, 112 aa, homo sapiens
GPVPPSTALRELIEELVNITQNQKAPLCNGSMVWSINLTAGMYCAALESLINVSGCSAIEKTQRMLSGFCPHKVSAGQFSSLHVRDTKIEVAQFVKDLLLHLKKLFRQGRFN

SEQ ID NO: 625 - protein, 112 aa, homo sapiens
GPVPPSTALRELIEELVNITQNQKAPLCNGSMVWSINLTAGMYCAALESLINVSGCSAIEKTQRMLSGFCPHKVSAGQFSSLHVRDTKIEVAQFVKDLLLHLKKLFRNGRFN

SEQ ID NO: 626 - protein, 112 aa, homo sapiens
GPVPPSTALRELIEELVNITQNQKAPLCNGSMVWSINLTAGMYCAALESLINVSGCSAIEKTQRMLSGFCPHKVSAGQFSSLHVRDTKIEVAQFVKDLLLHLKKLFRHGRFN

SEQ ID NO: 627 - protein, 112 aa, homo sapiens
GPVPPSTALRELIEELVNITQNQKAPLCNGSMVWSINLTAGMYCAALESLINVSGCSAIEKTQRMLSGFCPHKVSAGQFSSLHVRDTKIEVAQFVKDLLLHLKKLFREGHFN

SEQ ID NO: 628 - protein, 112 aa, homo sapiens
GPVPPSTALRELIEELVNITQNQKAPLCNGSMVWSINLTAGMYCAALESLINVSGCSAIEKTQRMLSGFCPHKVSAGQFSSLHVRDTKIEVAQFVKDLLLHLKKLFREGQFN

SEQ ID NO: 629 - protein, 112 aa, homo sapiens
GPVPPSTALRELIEELVNITQNQKAPLCNGSMVWSINLTAGMYCAALESLINVSGCSAIEKTQRMLSGFCPHKVSAGQFSSLHVRDTKIEVAQFVKDLLLHLKKLFREGRIN

SEQ ID NO: 630 - protein, 112 aa, homo sapiens
GPVPPSTALRELIEELVNITQNQKAPLCNGSMVWSINLTAGMYCAALESLINVSGCSAIEKTQRMLSGFCPHKVSAGQFSSLHVRDTKIEVAQFVKDLLLHLKKLFREGRVN

SEQ ID NO: 631 - protein, 177 aa, homo sapiens
TPLGPASSLPQSFLLKCLEQVRKIQGDGAALQEKLVSECATYKLCHPEELVLLGHSLGIPSAPLSSCPSQALQLAGCLSQLHSGLFLYQGLLQALEGISPELGPTLDTLQLDVADFATTIWQQMEELGMAPALQPTQGAMPAFASAFQRRAGGVLVASHLQSFLEVSYRVLRHLAQP

SEQ ID NO: 632 - protein, 177 aa, homo sapiens
TPLGPASSLPQSFLLKCLEQVRKIQGDGAALQEKLVSECATYKLCHPEELVLLGHSLGIPHAPLSSCPSQALQLAGCLSQLHSGLFLYQGLLQALEGISPELGPTLDTLQLDVADFATTIWQQMEELGMAPALQPTQGAMPAFASAFQRRAGGVLVASHLQSFLEVSYRVLRHLAQP

SEQ ID NO: 633 - protein, 177 aa, homo sapiens
TPLGPASSLPQSFLLKCLEQVRKIQGDGAALQEKLVSECATYKLCHPEELVLLGHSLGIPWASLSSCPSQALQLAGCLSQLHSGLFLYQGLLQALEGISPELGPTLDTLQLDVADFATTIWQQMEELGMAPALQPTQGAMPAFASAFQRRAGGVLVASHLQSFLEVSYRVLRHLAQP

SEQ ID NO: 634 - protein, 177 aa, homo sapiens
TPLGPASSLPQSFLLKCLEQVRKIQGDGAALQEKLVSECATYKLCHPEELVLLGHSLGIPWAALSSCPSQALQLAGCLSQLHSGLFLYQGLLQALEGISPELGPTLDTLQLDVADFATTIWQQMEELGMAPALQPTQGAMPAFASAFQRRAGGVLVASHLQSFLEVSYRVLRHLAQP

SEQ ID NO: 635 - protein, 177 aa, homo sapiens
TPLGPASSLPQSFLLKCLEQVRKIQGDGAALQEKLVSECATYKLCHPEELVLLGHSLGIPWAPLSSCSSQALQLAGCLSQLHSGLFLYQGLLQALEGISPELGPTLDTLQLDVADFATTIWQQMEELGMAPALQPTQGAMPAFASAFQRRAGGVLVASHLQSFLEVSYRVLRHLAQP

SEQ ID NO: 636 - protein, 177 aa, homo sapiens
TPLGPASSLPQSFLLKCLEQVRKIQGDGAALQEKLVSECATYKLCHPEELVLLGHSLGIPWAPLSSCASQALQLAGCLSQLHSGLFLYQGLLQALEGISPELGPTLDTLQLDVADFATTIWQQMEELGMAPALQPTQGAMPAFASAFQRRAGGVLVASHLQSFLEVSYRVLRHLAQP

SEQ ID NO: 637 - protein, 177 aa, homo sapiens
TPLGPASSLPQSFLLKCLEQVRKIQGDGAALQEKLVSECATYKLCHPEELVLLGHSLGIPWAPLSSCPSQAVQLAGCLSQLHSGLFLYQGLLQALEGISPELGPTLDTLQLDVADFATTIWQQMEELGMAPALQPTQGAMPAFASAFQRRAGGVLVASHLQSFLEVSYRVLRHLAQP

SEQ ID NO: 638 - protein, 177 aa, homo sapiens
TPLGPASSLPQSFLLKCLEQVRKIQGDGAALQEKLVSECATYKLCHPEELVLLGHSLGIPWAPLSSCPSQAIQLAGCLSQLHSGLFLYQGLLQALEGISPELGPTLDTLQLDVADFATTIWQQMEELGMAPALQPTQGAMPAFASAFQRRAGGVLVASHLQSFLEVSYRVLRHLAQP

SEQ ID NO: 639 - protein, 177 aa, homo sapiens
TPLGPASSLPQSFLLKCLEQVRKIQGDGAALQEKLVSECATYKLCHPEELVLLGHSLGIPWAPLSSCPSQALQLAGCLSQLHSGLILYQGLLQALEGISPELGPTLDTLQLDVADFATTIWQQMEELGMAPALQPTQGAMPAFASAFQRRAGGVLVASHLQSFLEVSYRVLRHLAQP

SEQ ID NO: 640 - protein, 177 aa, homo sapiens
TPLGPASSLPQSFLLKCLEQVRKIQGDGAALQEKLVSECATYKLCHPEELVLLGHSLGIPWAPLSSCPSQALQLAGCLSQLHSGLVLYQGLLQALEGISPELGPTLDTLQLDVADFATTIWQQMEELGMAPALQPTQGAMPAFASAFQRRAGGVLVASHLQSFLEVSYRVLRHLAQP

SEQ ID NO: 641 - protein, 177 aa, homo sapiens
TPLGPASSLPQSFLLKCLEQVRKIQGDGAALQEKLVSECATYKLCHPEELVLLGHSLGIPWAPLSSCPSQALQLAGCLSQLHSGLFLYQGLLQALQGISPELGPTLDTLQLDVADFATTIWQQMEELGMAPALQPTQGAMPAFASAFQRRAGGVLVASHLQSFLEVSYRVLRHLAQP

SEQ ID NO: 642 - protein, 177 aa, homo sapiens
TPLGPASSLPQSFLLKCLEQVRKIQGDGAALQEKLVSECATYKLCHPEELVLLGHSLGIPWAPLSSCPSQALQLAGCLSQLHSGLFLYQGLLQALNGISPELGPTLDTLQLDVADFATTIWQQMEELGMAPALQPTQGAMPAFASAFQRRAGGVLVASHLQSFLEVSYRVLRHLAQP

SEQ ID NO: 643 - protein, 177 aa, homo sapiens
TPLGPASSLPQSFLLKCLEQVRKIQGDGAALQEKLVSECATYKLCHPEELVLLGHSLGIPWAPLSSCPSQALQLAGCLSQLHSGLFLYQGLLQALHGISPELGPTLDTLQLDVADFATTIWQQMEELGMAPALQPTQGAMPAFASAFQRRAGGVLVASHLQSFLEVSYRVLRHLAQP

SEQ ID NO: 644 - protein, 177 aa, homo sapiens
TPLGPASSLPQSFLLKCLEQVRKIQGDGAALQEKLVSECATYKLCHPEELVLLGHSLGIPWAPLSSCPSQALQLAGCLSQLHSGLFLYQGLLQALEGISSELGPTLDTLQLDVADFATTIWQQMEELGMAPALQPTQGAMPAFASAFQRRAGGVLVASHLQSFLEVSYRVLRHLAQP

SEQ ID NO: 645 - protein, 177 aa, homo sapiens
TPLGPASSLPQSFLLKCLEQVRKIQGDGAALQEKLVSECATYKLCHPEELVLLGHSLGIPWAPLSSCPSQALQLAGCLSQLHSGLFLYQGLLQALEGISAELGPTLDTLQLDVADFATTIWQQMEELGMAPALQPTQGAMPAFASAFQRRAGGVLVASHLQSFLEVSYRVLRHLAQP

SEQ ID NO: 646 - protein, 177 aa, homo sapiens
TPLGPASSLPQSFLLKCLEQVRKIQGDGAALQEKLVSECATYKLCHPEELVLLGHSLGIPWAPLSSCPSQALQLAGCLSQLHSGLFLYQGLLQALEGISPQLGPTLDTLQLDVADFATTIWQQMEELGMAPALQPTQGAMPAFASAFQRRAGGVLVASHLQSFLEVSYRVLRHLAQP

SEQ ID NO: 647 - protein, 177 aa, homo sapiens
TPLGPASSLPQSFLLKCLEQVRKIQGDGAALQEKLVSECATYKLCHPEELVLLGHSLGIPWAPLSSCPSQALQLAGCLSQLHSGLFLYQGLLQALEGISPNLGPTLDTLQLDVADFATTIWQQMEELGMAPALQPTQGAMPAFASAFQRRAGGVLVASHLQSFLEVSYRVLRHLAQP

SEQ ID NO: 648 - protein, 177 aa, homo sapiens
TPLGPASSLPQSFLLKCLEQVRKIQGDGAALQEKLVSECATYKLCHPEELVLLGHSLGIPWAPLSSCPSQALQLAGCLSQLHSGLFLYQGLLQALEGISPHLGPTLDTLQLDVADFATTIWQQMEELGMAPALQPTQGAMPAFASAFQRRAGGVLVASHLQSFLEVSYRVLRHLAQP

SEQ ID NO: 649 - protein, 177 aa, homo sapiens
TPLGPASSLPQSFLLKCLEQVRKIQGDGAALQEKLVSECATYKLCHPEELVLLGHSLGIPWAPLSSCPSQALQLAGCLSQLHSGLFLYQGLLQALEGISPELGPTLDTLQLDVADFATTIWQQMEELGMASALQPTQGAMPAFASAFQRRAGGVLVASHLQSFLEVSYRVLRHLAQP

SEQ ID NO: 650 - protein, 177 aa, homo sapiens
TPLGPASSLPQSFLLKCLEQVRKIQGDGAALQEKLVSECATYKLCHPEELVLLGHSLGIPWAPLSSCPSQALQLAGCLSQLHSGLFLYQGLLQALEGISPELGPTLDTLQLDVADFATTIWQQMEELGMAAALQPTQGAMPAFASAFQRRAGGVLVASHLQSFLEVSYRVLRHLAQP

SEQ ID NO: 651 - protein, 177 aa, homo sapiens
TPLGPASSLPQSFLLKCLEQVRKIQGDGAALQEKLVSECATYKLCHPEELVLLGHSLGIPWAPLSSCPSQALQLAGCLSQLHSGLFLYQGLLQALEGISPELGPTLDTLQLDVADFATTIWQQMEELGMAPAVQPTQGAMPAFASAFQRRAGGVLVASHLQSFLEVSYRVLRHLAQP

SEQ ID NO: 652 - protein, 177 aa, homo sapiens
TPLGPASSLPQSFLLKCLEQVRKIQGDGAALQEKLVSECATYKLCHPEELVLLGHSLGIPWAPLSSCPSQALQLAGCLSQLHSGLFLYQGLLQALEGISPELGPTLDTLQLDVADFATTIWQQMEELGMAPAIQPTQGAMPAFASAFQRRAGGVLVASHLQSFLEVSYRVLRHLAQP

SEQ ID NO: 653 - protein, 177 aa, homo sapiens
TPLGPASSLPQSFLLKCLEQVRKIQGDGAALQEKLVSECATYKLCHPEELVLLGHSLGIPWAPLSSCPSQALQLAGCLSQLHSGLFLYQGLLQALEGISPELGPTLDTLQLDVADFATTIWQQMEELGMAPALQSTQGAMPAFASAFQRRAGGVLVASHLQSFLEVSYRVLRHLAQP

SEQ ID NO: 654 - protein, 177 aa, homo sapiens
TPLGPASSLPQSFLLKCLEQVRKIQGDGAALQEKLVSECATYKLCHPEELVLLGHSLGIPWAPLSSCPSQALQLAGCLSQLHSGLFLYQGLLQALEGISPELGPTLDTLQLDVADFATTIWQQMEELGMAPALQATQGAMPAFASAFQRRAGGVLVASHLQSFLEVSYRVLRHLAQP

SEQ ID NO: 655 - protein, 177 aa, homo sapiens
TPLGPASSLPQSFLLKCLEQVRKIQGDGAALQEKLVSECATYKLCHPEELVLLGHSLGIPWAPLSSCPSQALQLAGCLSQLHSGLFLYQGLLQALEGISPELGPTLDTLQLDVADFATTIWQQMEELGMAPALQPTQGAMPAFASAIQRRAGGVLVASHLQSFLEVSYRVLRHLAQP

SEQ ID NO: 656 - protein, 177 aa, homo sapiens
TPLGPASSLPQSFLLKCLEQVRKIQGDGAALQEKLVSECATYKLCHPEELVLLGHSLGIPWAPLSSCPSQALQLAGCLSQLHSGLFLYQGLLQALEGISPELGPTLDTLQLDVADFATTIWQQMEELGMAPALQPTQGAMPAFASAVQRRAGGVLVASHLQSFLEVSYRVLRHLAQP

SEQ ID NO: 657 - protein, 177 aa, homo sapiens
TPLGPASSLPQSFLLKCLEQVRKIQGDGAALQEKLVSECATYKLCHPEELVLLGHSLGIPWAPLSSCPSQALQLAGCLSQLHSGLFLYQGLLQALEGISPELGPTLDTLQLDVADFATTIWQQMEELGMAPALQPTQGAMPAFASAFQRRAGGVLVASHLQSFLEVSYHVLRHLAQP

SEQ ID NO: 658 - protein, 177 aa, homo sapiens
TPLGPASSLPQSFLLKCLEQVRKIQGDGAALQEKLVSECATYKLCHPEELVLLGHSLGIPWAPLSSCPSQALQLAGCLSQLHSGLFLYQGLLQALEGISPELGPTLDTLQLDVADFATTIWQQMEELGMAPALQPTQGAMPAFASAFQRRAGGVLVASHLQSFLEVSYQVLRHLAQP

SEQ ID NO: 659 - protein, 177 aa, homo sapiens
TPLGPASSLPQSFLLKCLEQVRKIQGDGAALQEKLVSECATYKLCHPEELVLLGHSLGIPWAPLSSCPSQALQLAGCLSQLHSGLFLYQGLLQALEGISPELGPTLDTLQLDVADFATTIWQQMEELGMAPALQPTQGAMPAFASAFQRRAGGVLVASHLQSFLEVSYRVLHHLAQP

SEQ ID NO: 660 - protein, 177 aa, homo sapiens
TPLGPASSLPQSFLLKCLEQVRKIQGDGAALQEKLVSECATYKLCHPEELVLLGHSLGIPWAPLSSCPSQALQLAGCLSQLHSGLFLYQGLLQALEGISPELGPTLDTLQLDVADFATTIWQQMEELGMAPALQPTQGAMPAFASAFQRRAGGVLVASHLQSFLEVSYRVLQHLAQP

SEQ ID NO: 661 - protein, 177 aa, homo sapiens
TPLGPASSLPQSFLLKCLEQVRKIQGDGAALQEKLVSECATYKLCHPEELVLLGHSLGIPWAPLSSCPSQALQLAGCLSQLHSGLFLYQGLLQALEGISPELGPTLDTLQLDVADFATTIWQQMEELGMAPALQPTQGAMPAFASAFQRRAGGVLVASHLQSFLEVSYRVLRHLAQS

SEQ ID NO: 662 - protein, 177 aa, homo sapiens
TPLGPASSLPQSFLLKCLEQVRKIQGDGAALQEKLVSECATYKLCHPEELVLLGHSLGIPWAPLSSCPSQALQLAGCLSQLHSGLFLYQGLLQALEGISPELGPTLDTLQLDVADFATTIWQQMEELGMAPALQPTQGAMPAFASAFQRRAGGVLVASHLQSFLEVSYRVLRHLAQA

SEQ ID NO: 663 - protein, 146 aa, Homo sapiens
VPIQKVQDDTKTLIKTIVTRINDISHTQSVSSKQKVTGLDFISGLHPILTLSKMDQTLAVYQQILTSMPSRNVIQISNDLENLRDLLHVLAFSKSCHLPWASGLETLDSLGGVLEASGYSTEVVALSRLQGSLQDMLWQLDLSPGC

SEQ ID NO: 664 - protein, 146 aa, Homo sapiens
VPIQKVQDDTKTLIKTIVTRINDISHTQSVSSKQKVTGLDFIAGLHPILTLSKMDQTLAVYQQILTSMPSRNVIQISNDLENLRDLLHVLAFSKSCHLPWASGLETLDSLGGVLEASGYSTEVVALSRLQGSLQDMLWQLDLSPGC

SEQ ID NO: 665 - protein, 146 aa, Homo sapiens
VPIQKVQDDTKTLIKTIVTRINDISHTQSVSSKQKVTGLDFIPGLHPIVTLSKMDQTLAVYQQILTSMPSRNVIQISNDLENLRDLLHVLAFSKSCHLPWASGLETLDSLGGVLEASGYSTEVVALSRLQGSLQDMLWQLDLSPGC

SEQ ID NO: 666 - protein, 146 aa, Homo sapiens
VPIQKVQDDTKTLIKTIVTRINDISHTQSVSSKQKVTGLDFIPGLHPIITLSKMDQTLAVYQQILTSMPSRNVIQISNDLENLRDLLHVLAFSKSCHLPWASGLETLDSLGGVLEASGYSTEVVALSRLQGSLQDMLWQLDLSPGC

SEQ ID NO: 667 - protein, 146 aa, Homo sapiens
VPIQKVQDDTKTLIKTIVTRINDISHTQSVSSKQKVTGLDFIPGLHPILTLSKMDQTLAVYQQILTSMPSRNVIQISNDLENLRDLLHVLAFSKSCHLSWASGLETLDSLGGVLEASGYSTEVVALSRLQGSLQDMLWQLDLSPGC

SEQ ID NO: 668 - protein, 146 aa, Homo sapiens
VPIQKVQDDTKTLIKTIVTRINDISHTQSVSSKQKVTGLDFIPGLHPILTLSKMDQTLAVYQQILTSMPSRNVIQISNDLENLRDLLHVLAFSKSCHLAWASGLETLDSLGGVLEASGYSTEVVALSRLQGSLQDMLWQLDLSPGC

SEQ ID NO: 669 - protein, 146 aa, Homo sapiens
VPIQKVQDDTKTLIKTIVTRINDISHTQSVSSKQKVTGLDFIPGLHPILTLSKMDQTLAVYQQILTSMPSRNVIQISNDLENLRDLLHVLAFSKSCHLPSASGLETLDSLGGVLEASGYSTEVVALSRLQGSLQDMLWQLDLSPGC

SEQ ID NO: 670 - protein, 146 aa, Homo sapiens
VPIQKVQDDTKTLIKTIVTRINDISHTQSVSSKQKVTGLDFIPGLHPILTLSKMDQTLAVYQQILTSMPSRNVIQISNDLENLRDLLHVLAFSKSCHLPHASGLETLDSLGGVLEASGYSTEVVALSRLQGSLQDMLWQLDLSPGC

SEQ ID NO: 671 - protein, 146 aa, Homo sapiens
VPIQKVQDDTKTLIKTIVTRINDISHTQSVSSKQKVTGLDFIPGLHPILTLSKMDQTLAVYQQILTSMPSRNVIQISNDLENLRDLLHVLAFSKSCHLPWASGVETLDSLGGVLEASGYSTEVVALSRLQGSLQDMLWQLDLSPGC

SEQ ID NO: 672 - protein, 146 aa, Homo sapiens
VPIQKVQDDTKTLIKTIVTRINDISHTQSVSSKQKVTGLDFIPGLHPILTLSKMDQTLAVYQQILTSMPSRNVIQISNDLENLRDLLHVLAFSKSCHLPWASGIETLDSLGGVLEASGYSTEVVALSRLQGSLQDMLWQLDLSPGC

SEQ ID NO: 673 - protein, 146 aa, Homo sapiens
VPIQKVQDDTKTLIKTIVTRINDISHTQSVSSKQKVTGLDFIPGLHPILTLSKMDQTLAVYQQILTSMPSRNVIQISNDLENLRDLLHVLAFSKSCHLPWASGLQTLDSLGGVLEASGYSTEVVALSRLQGSLQDMLWQLDLSPGC

SEQ ID NO: 674 - protein, 146 aa, Homo sapiens
VPIQKVQDDTKTLIKTIVTRINDISHTQSVSSKQKVTGLDFIPGLHPILTLSKMDQTLAVYQQILTSMPSRNVIQISNDLENLRDLLHVLAFSKSCHLPWASGLNTLDSLGGVLEASGYSTEVVALSRLQGSLQDMLWQLDLSPGC

SEQ ID NO: 675 - protein, 146 aa, Homo sapiens
VPIQKVQDDTKTLIKTIVTRINDISHTQSVSSKQKVTGLDFIPGLHPILTLSKMDQTLAVYQQILTSMPSRNVIQISNDLENLRDLLHVLAFSKSCHLPWASGLHTLDSLGGVLEASGYSTEVVALSRLQGSLQDMLWQLDLSPGC

SEQ ID NO: 676 - protein, 146 aa, Homo sapiens
VPIQKVQDDTKTLIKTIVTRINDISHTQSVSSKQKVTGLDFIPGLHPILTLSKMDQTLAVYQQILTSMPSRNVIQISNDLENLRDLLHVLAFSKSCHLPWASGLETVDSLGGVLEASGYSTEVVALSRLQGSLQDMLWQLDLSPGC

SEQ ID NO: 677 - protein, 146 aa, Homo sapiens
VPIQKVQDDTKTLIKTIVTRINDISHTQSVSSKQKVTGLDFIPGLHPILTLSKMDQTLAVYQQILTSMPSRNVIQISNDLENLRDLLHVLAFSKSCHLPWASGLETIDSLGGVLEASGYSTEVVALSRLQGSLQDMLWQLDLSPGC

SEQ ID NO: 678 - protein, 146 aa, Homo sapiens
VPIQKVQDDTKTLIKTIVTRINDISHTQSVSSKQKVTGLDFIPGLHPILTLSKMDQTLAVYQQILTSMPSRNVIQISNDLENLRDLLHVLAFSKSCHLPWASGLETLQSLGGVLEASGYSTEVVALSRLQGSLQDMLWQLDLSPGC

SEQ ID NO: 679 - protein, 146 aa, Homo sapiens
VPIQKVQDDTKTLIKTIVTRINDISHTQSVSSKQKVTGLDFIPGLHPILTLSKMDQTLAVYQQILTSMPSRNVIQISNDLENLRDLLHVLAFSKSCHLPWASGLETLNSLGGVLEASGYSTEVVALSRLQGSLQDMLWQLDLSPGC

SEQ ID NO: 680 - protein, 146 aa, Homo sapiens
VPIQKVQDDTKTLIKTIVTRINDISHTQSVSSKQKVTGLDFIPGLHPILTLSKMDQTLAVYQQILTSMPSRNVIQISNDLENLRDLLHVLAFSKSCHLPWASGLETLDSLGGVLEASGYSTEVVALSRLQGSLQDMLWQLQLSPGC

SEQ ID NO: 681 - protein, 146 aa, Homo sapiens
VPIQKVQDDTKTLIKTIVTRINDISHTQSVSSKQKVTGLDFIPGLHPILTLSKMDQTLAVYQQILTSMPSRNVIQISNDLENLRDLLHVLAFSKSCHLPWASGLETLDSLGGVLEASGYSTEVVALSRLQGSLQDMLWQLNLSPGC

SEQ ID NO: 682 - protein, 146 aa, Homo sapiens
VPIQKVQDDTKTLIKTIVTRINDISHTQSVSSKQKVTGLDFIPGLHPILTLSKMDQTLAVYQQILTSMPSRNVIQISNDLENLRDLLHVLAFSKSCHLPWASGLETLDSLGGVLEASGYSTEVVALSRLQGSLQDMLWQLDVSPGC

SEQ ID NO: 683 - protein, 146 aa, Homo sapiens
VPIQKVQDDTKTLIKTIVTRINDISHTQSVSSKQKVTGLDFIPGLHPILTLSKMDQTLAVYQQILTSMPSRNVIQISNDLENLRDLLHVLAFSKSCHLPWASGLETLDSLGGVLEASGYSTEVVALSRLQGSLQDMLWQLDISPGC

SEQ ID NO: 684 - protein, 200 aa, Homo sapiens
MAFTEHSPLTPHRRDLCSRSIWLARKIRSDLTALTESYVKHQGLNKNINLDSADGMPVASTQQWSELTEAERLQENLQAYRTFHVLLARLLEDQQVHFTPTEGDFHQAIHTLLLQVAAFAYQIEELMILLEYKIPRNEADGMPINVGDGGLFEKKLWGLKVLQELSQWTVRSIHDLRFISSHQTGIPARGSHYIANNKKM

SEQ ID NO: 685 - protein, 200 aa, Homo sapiens
MAFTEHSPLTPHRRDLCSRSIWLARKIRSDLTALTESYVKHQGLNKNINLDSADGMPVASTNQWSELTEAERLQENLQAYRTFHVLLARLLEDQQVHFTPTEGDFHQAIHTLLLQVAAFAYQIEELMILLEYKIPRNEADGMPINVGDGGLFEKKLWGLKVLQELSQWTVRSIHDLRFISSHQTGIPARGSHYIANNKKM

SEQ ID NO: 686 - protein, 200 aa, Homo sapiens
MAFTEHSPLTPHRRDLCSRSIWLARKIRSDLTALTESYVKHQGLNKNINLDSADGMPVASTDQSSELTEAERLQENLQAYRTFHVLLARLLEDQQVHFTPTEGDFHQAIHTLLLQVAAFAYQIEELMILLEYKIPRNEADGMPINVGDGGLFEKKLWGLKVLQELSQWTVRSIHDLRFISSHQTGIPARGSHYIANNKKM

SEQ ID NO: 687 - protein, 200 aa, Homo sapiens
MAFTEHSPLTPHRRDLCSRSIWLARKIRSDLTALTESYVKHQGLNKNINLDSADGMPVASTDQHSELTEAERLQENLQAYRTFHVLLARLLEDQQVHFTPTEGDFHQAIHTLLLQVAAFAYQIEELMILLEYKIPRNEADGMPINVGDGGLFEKKLWGLKVLQELSQWTVRSIHDLRFISSHQTGIPARGSHYIANNKKM

SEQ ID NO: 688 - protein, 200 aa, Homo sapiens
MAFTEHSPLTPHRRDLCSRSIWLARKIRSDLTALTESYVKHQGLNKNINLDSADGMPVASTDQWSQLTEAERLQENLQAYRTFHVLLARLLEDQQVHFTPTEGDFHQAIHTLLLQVAAFAYQIEELMILLEYKIPRNEADGMPINVGDGGLFEKKLWGLKVLQELSQWTVRSIHDLRFISSHQTGIPARGSHYIANNKKM

SEQ ID NO: 689 - protein, 200 aa, Homo sapiens
MAFTEHSPLTPHRRDLCSRSIWLARKIRSDLTALTESYVKHQGLNKNINLDSADGMPVASTDQWSNLTEAERLQENLQAYRTFHVLLARLLEDQQVHFTPTEGDFHQAIHTLLLQVAAFAYQIEELMILLEYKIPRNEADGMPINVGDGGLFEKKLWGLKVLQELSQWTVRSIHDLRFISSHQTGIPARGSHYIANNKKM

SEQ ID NO: 690 - protein, 200 aa, Homo sapiens
MAFTEHSPLTPHRRDLCSRSIWLARKIRSDLTALTESYVKHQGLNKNINLDSADGMPVASTDQWSHLTEAERLQENLQAYRTFHVLLARLLEDQQVHFTPTEGDFHQAIHTLLLQVAAFAYQIEELMILLEYKIPRNEADGMPINVGDGGLFEKKLWGLKVLQELSQWTVRSIHDLRFISSHQTGIPARGSHYIANNKKM

SEQ ID NO: 691 - protein, 200 aa, Homo sapiens
MAFTEHSPLTPHRRDLCSRSIWLARKIRSDLTALTESYVKHQGLNKNINLDSADGMPVASTDQWSEVTEAERLQENLQAYRTFHVLLARLLEDQQVHFTPTEGDFHQAIHTLLLQVAAFAYQIEELMILLEYKIPRNEADGMPINVGDGGLFEKKLWGLKVLQELSQWTVRSIHDLRFISSHQTGIPARGSHYIANNKKM

SEQ ID NO: 692 - protein, 200 aa, Homo sapiens
MAFTEHSPLTPHRRDLCSRSIWLARKIRSDLTALTESYVKHQGLNKNINLDSADGMPVASTDQWSEITEAERLQENLQAYRTFHVLLARLLEDQQVHFTPTEGDFHQAIHTLLLQVAAFAYQIEELMILLEYKIPRNEADGMPINVGDGGLFEKKLWGLKVLQELSQWTVRSIHDLRFISSHQTGIPARGSHYIANNKKM

SEQ ID NO: 693 - protein, 200 aa, Homo sapiens
MAFTEHSPLTPHRRDLCSRSIWLARKIRSDLTALTESYVKHQGLNKNINLDSADGMPVASTDQWSELTEAERLQENLQAYRTFHVVLARLLEDQQVHFTPTEGDFHQAIHTLLLQVAAFAYQIEELMILLEYKIPRNEADGMPINVGDGGLFEKKLWGLKVLQELSQWTVRSIHDLRFISSHQTGIPARGSHYIANNKKM

SEQ ID NO: 694 - protein, 200 aa, Homo sapiens
MAFTEHSPLTPHRRDLCSRSIWLARKIRSDLTALTESYVKHQGLNKNINLDSADGMPVASTDQWSELTEAERLQENLQAYRTFHVILARLLEDQQVHFTPTEGDFHQAIHTLLLQVAAFAYQIEELMILLEYKIPRNEADGMPINVGDGGLFEKKLWGLKVLQELSQWTVRSIHDLRFISSHQTGIPARGSHYIANNKKM

SEQ ID NO: 695 - protein, 200 aa, Homo sapiens
MAFTEHSPLTPHRRDLCSRSIWLARKIRSDLTALTESYVKHQGLNKNINLDSADGMPVASTDQWSELTEAERLQENLQAYRTFHVLLAHLLEDQQVHFTPTEGDFHQAIHTLLLQVAAFAYQIEELMILLEYKIPRNEADGMPINVGDGGLFEKKLWGLKVLQELSQWTVRSIHDLRFISSHQTGIPARGSHYIANNKKM

SEQ ID NO: 696 - protein, 200 aa, Homo sapiens
MAFTEHSPLTPHRRDLCSRSIWLARKIRSDLTALTESYVKHQGLNKNINLDSADGMPVASTDQWSELTEAERLQENLQAYRTFHVLLAQLLEDQQVHFTPTEGDFHQAIHTLLLQVAAFAYQIEELMILLEYKIPRNEADGMPINVGDGGLFEKKLWGLKVLQELSQWTVRSIHDLRFISSHQTGIPARGSHYIANNKKM

SEQ ID NO: 697 - protein, 200 aa, Homo sapiens
MAFTEHSPLTPHRRDLCSRSIWLARKIRSDLTALTESYVKHQGLNKNINLDSADGMPVASTDQWSELTEAERLQENLQAYRTFHVLLARLLQDQQVHFTPTEGDFHQAIHTLLLQVAAFAYQIEELMILLEYKIPRNEADGMPINVGDGGLFEKKLWGLKVLQELSQWTVRSIHDLRFISSHQTGIPARGSHYIANNKKM

SEQ ID NO: 698 - protein, 200 aa, Homo sapiens
MAFTEHSPLTPHRRDLCSRSIWLARKIRSDLTALTESYVKHQGLNKNINLDSADGMPVASTDQWSELTEAERLQENLQAYRTFHVLLARLLNDQQVHFTPTEGDFHQAIHTLLLQVAAFAYQIEELMILLEYKIPRNEADGMPINVGDGGLFEKKLWGLKVLQELSQWTVRSIHDLRFISSHQTGIPARGSHYIANNKKM

SEQ ID NO: 699 - protein, 200 aa, Homo sapiens
MAFTEHSPLTPHRRDLCSRSIWLARKIRSDLTALTESYVKHQGLNKNINLDSADGMPVASTDQWSELTEAERLQENLQAYRTFHVLLARLLHDQQVHFTPTEGDFHQAIHTLLLQVAAFAYQIEELMILLEYKIPRNEADGMPINVGDGGLFEKKLWGLKVLQELSQWTVRSIHDLRFISSHQTGIPARGSHYIANNKKM

SEQ ID NO: 700 - protein, 200 aa, Homo sapiens
MAFTEHSPLTPHRRDLCSRSIWLARKIRSDLTALTESYVKHQGLNKNINLDSADGMPVASTDQWSELTEAERLQENLQAYRTFHVLLARLLEDQQVHFTSTEGDFHQAIHTLLLQVAAFAYQIEELMILLEYKIPRNEADGMPINVGDGGLFEKKLWGLKVLQELSQWTVRSIHDLRFISSHQTGIPARGSHYIANNKKM

SEQ ID NO: 701 - protein, 200 aa, Homo sapiens
MAFTEHSPLTPHRRDLCSRSIWLARKIRSDLTALTESYVKHQGLNKNINLDSADGMPVASTDQWSELTEAERLQENLQAYRTFHVLLARLLEDQQVHFTATEGDFHQAIHTLLLQVAAFAYQIEELMILLEYKIPRNEADGMPINVGDGGLFEKKLWGLKVLQELSQWTVRSIHDLRFISSHQTGIPARGSHYIANNKKM

SEQ ID NO: 702 - protein, 200 aa, Homo sapiens
MAFTEHSPLTPHRRDLCSRSIWLARKIRSDLTALTESYVKHQGLNKNINLDSADGMPVASTDQWSELTEAERLQENLQAYRTFHVLLARLLEDQQVHFTPTQGDFHQAIHTLLLQVAAFAYQIEELMILLEYKIPRNEADGMPINVGDGGLFEKKLWGLKVLQELSQWTVRSIHDLRFISSHQTGIPARGSHYIANNKKM

SEQ ID NO: 703 - protein, 200 aa, Homo sapiens
MAFTEHSPLTPHRRDLCSRSIWLARKIRSDLTALTESYVKHQGLNKNINLDSADGMPVASTDQWSELTEAERLQENLQAYRTFHVLLARLLEDQQVHFTPTNGDFHQAIHTLLLQVAAFAYQIEELMILLEYKIPRNEADGMPINVGDGGLFEKKLWGLKVLQELSQWTVRSIHDLRFISSHQTGIPARGSHYIANNKKM

SEQ ID NO: 704 - protein, 200 aa, Homo sapiens
MAFTEHSPLTPHRRDLCSRSIWLARKIRSDLTALTESYVKHQGLNKNINLDSADGMPVASTDQWSELTEAERLQENLQAYRTFHVLLARLLEDQQVHFTPTHGDFHQAIHTLLLQVAAFAYQIEELMILLEYKIPRNEADGMPINVGDGGLFEKKLWGLKVLQELSQWTVRSIHDLRFISSHQTGIPARGSHYIANNKKM

SEQ ID NO: 705 - protein, 200 aa, Homo sapiens
MAFTEHSPLTPHRRDLCSRSIWLARKIRSDLTALTESYVKHQGLNKNINLDSADGMPVASTDQWSELTEAERLQENLQAYRTFHVLLARLLEDQQVHFTPTEGQFHQAIHTLLLQVAAFAYQIEELMILLEYKIPRNEADGMPINVGDGGLFEKKLWGLKVLQELSQWTVRSIHDLRFISSHQTGIPARGSHYIANNKKM

SEQ ID NO: 706 - protein, 200 aa, Homo sapiens
MAFTEHSPLTPHRRDLCSRSIWLARKIRSDLTALTESYVKHQGLNKNINLDSADGMPVASTDQWSELTEAERLQENLQAYRTFHVLLARLLEDQQVHFTPTEGNFHQAIHTLLLQVAAFAYQIEELMILLEYKIPRNEADGMPINVGDGGLFEKKLWGLKVLQELSQWTVRSIHDLRFISSHQTGIPARGSHYIANNKKM

SEQ ID NO: 707 - protein, 200 aa, Homo sapiens
MAFTEHSPLTPHRRDLCSRSIWLARKIRSDLTALTESYVKHQGLNKNINLDSADGMPVASTDQWSELTEAERLQENLQAYRTFHVLLARLLEDQQVHFTPTEGDFHQAIHTLLLQVAAFAYQIEELMILLQYKIPRNEADGMPINVGDGGLFEKKLWGLKVLQELSQWTVRSIHDLRFISSHQTGIPARGSHYIANNKKM

SEQ ID NO: 708 - protein, 200 aa, Homo sapiens
MAFTEHSPLTPHRRDLCSRSIWLARKIRSDLTALTESYVKHQGLNKNINLDSADGMPVASTDQWSELTEAERLQENLQAYRTFHVLLARLLEDQQVHFTPTEGDFHQAIHTLLLQVAAFAYQIEELMILLNYKIPRNEADGMPINVGDGGLFEKKLWGLKVLQELSQWTVRSIHDLRFISSHQTGIPARGSHYIANNKKM

SEQ ID NO: 709 - protein, 200 aa, Homo sapiens
MAFTEHSPLTPHRRDLCSRSIWLARKIRSDLTALTESYVKHQGLNKNINLDSADGMPVASTDQWSELTEAERLQENLQAYRTFHVLLARLLEDQQVHFTPTEGDFHQAIHTLLLQVAAFAYQIEELMILLHYKIPRNEADGMPINVGDGGLFEKKLWGLKVLQELSQWTVRSIHDLRFISSHQTGIPARGSHYIANNKKM

SEQ ID NO: 710 - protein, 200 aa, Homo sapiens
MAFTEHSPLTPHRRDLCSRSIWLARKIRSDLTALTESYVKHQGLNKNINLDSADGMPVASTDQWSELTEAERLQENLQAYRTFHVLLARLLEDQQVHFTPTEGDFHQAIHTLLLQVAAFAYQIEELMILLEHKIPRNEADGMPINVGDGGLFEKKLWGLKVLQELSQWTVRSIHDLRFISSHQTGIPARGSHYIANNKKM

SEQ ID NO: 711 - protein, 200 aa, Homo sapiens
MAFTEHSPLTPHRRDLCSRSIWLARKIRSDLTALTESYVKHQGLNKNINLDSADGMPVASTDQWSELTEAERLQENLQAYRTFHVLLARLLEDQQVHFTPTEGDFHQAIHTLLLQVAAFAYQIEELMILLEIKIPRNEADGMPINVGDGGLFEKKLWGLKVLQELSQWTVRSIHDLRFISSHQTGIPARGSHYIANNKKM

SEQ ID NO: 712 - protein, 200 aa, Homo sapiens
MAFTEHSPLTPHRRDLCSRSIWLARKIRSDLTALTESYVKHQGLNKNINLDSADGMPVASTDQWSELTEAERLQENLQAYRTFHVLLARLLEDQQVHFTPTEGDFHQAIHTLLLQVAAFAYQIEELMILLEYQIPRNEADGMPINVGDGGLFEKKLWGLKVLQELSQWTVRSIHDLRFISSHQTGIPARGSHYIANNKKM

SEQ ID NO: 713 - protein, 200 aa, Homo sapiens
MAFTEHSPLTPHRRDLCSRSIWLARKIRSDLTALTESYVKHQGLNKNINLDSADGMPVASTDQWSELTEAERLQENLQAYRTFHVLLARLLEDQQVHFTPTEGDFHQAIHTLLLQVAAFAYQIEELMILLEYNIPRNEADGMPINVGDGGLFEKKLWGLKVLQELSQWTVRSIHDLRFISSHQTGIPARGSHYIANNKKM

SEQ ID NO: 714 - protein, 200 aa, Homo sapiens
MAFTEHSPLTPHRRDLCSRSIWLARKIRSDLTALTESYVKHQGLNKNINLDSADGMPVASTDQWSELTEAERLQENLQAYRTFHVLLARLLEDQQVHFTPTEGDFHQAIHTLLLQVAAFAYQIEELMILLEYKISRNEADGMPINVGDGGLFEKKLWGLKVLQELSQWTVRSIHDLRFISSHQTGIPARGSHYIANNKKM

SEQ ID NO: 715 - protein, 200 aa, Homo sapiens
MAFTEHSPLTPHRRDLCSRSIWLARKIRSDLTALTESYVKHQGLNKNINLDSADGMPVASTDQWSELTEAERLQENLQAYRTFHVLLARLLEDQQVHFTPTEGDFHQAIHTLLLQVAAFAYQIEELMILLEYKIARNEADGMPINVGDGGLFEKKLWGLKVLQELSQWTVRSIHDLRFISSHQTGIPARGSHYIANNKKM

SEQ ID NO: 716 - protein, 200 aa, Homo sapiens
MAFTEHSPLTPHRRDLCSRSIWLARKIRSDLTALTESYVKHQGLNKNINLDSADGMPVASTDQWSELTEAERLQENLQAYRTFHVLLARLLEDQQVHFTPTEGDFHQAIHTLLLQVAAFAYQIEELMILLEYKIPHNEADGMPINVGDGGLFEKKLWGLKVLQELSQWTVRSIHDLRFISSHQTGIPARGSHYIANNKKM

SEQ ID NO: 717 - protein, 200 aa, Homo sapiens
MAFTEHSPLTPHRRDLCSRSIWLARKIRSDLTALTESYVKHQGLNKNINLDSADGMPVASTDQWSELTEAERLQENLQAYRTFHVLLARLLEDQQVHFTPTEGDFHQAIHTLLLQVAAFAYQIEELMILLEYKIPQNEADGMPINVGDGGLFEKKLWGLKVLQELSQWTVRSIHDLRFISSHQTGIPARGSHYIANNKKM

SEQ ID NO: 718 - protein, 200 aa, Homo sapiens
MAFTEHSPLTPHRRDLCSRSIWLARKIRSDLTALTESYVKHQGLNKNINLDSADGMPVASTDQWSELTEAERLQENLQAYRTFHVLLARLLEDQQVHFTPTEGDFHQAIHTLLLQVAAFAYQIEELMILLEYKIPRNQADGMPINVGDGGLFEKKLWGLKVLQELSQWTVRSIHDLRFISSHQTGIPARGSHYIANNKKM

SEQ ID NO: 719 - protein, 200 aa, Homo sapiens
MAFTEHSPLTPHRRDLCSRSIWLARKIRSDLTALTESYVKHQGLNKNINLDSADGMPVASTDQWSELTEAERLQENLQAYRTFHVLLARLLEDQQVHFTPTEGDFHQAIHTLLLQVAAFAYQIEELMILLEYKIPRNNADGMPINVGDGGLFEKKLWGLKVLQELSQWTVRSIHDLRFISSHQTGIPARGSHYIANNKKM

SEQ ID NO: 720 - protein, 200 aa, Homo sapiens
MAFTEHSPLTPHRRDLCSRSIWLARKIRSDLTALTESYVKHQGLNKNINLDSADGMPVASTDQWSELTEAERLQENLQAYRTFHVLLARLLEDQQVHFTPTEGDFHQAIHTLLLQVAAFAYQIEELMILLEYKIPRNHADGMPINVGDGGLFEKKLWGLKVLQELSQWTVRSIHDLRFISSHQTGIPARGSHYIANNKKM

SEQ ID NO: 721 - protein, 200 aa, Homo sapiens
MAFTEHSPLTPHRRDLCSRSIWLARKIRSDLTALTESYVKHQGLNKNINLDSADGMPVASTDQWSELTEAERLQENLQAYRTFHVLLARLLEDQQVHFTPTEGDFHQAIHTLLLQVAAFAYQIEELMILLEYKIPRNEAQGMPINVGDGGLFEKKLWGLKVLQELSQWTVRSIHDLRFISSHQTGIPARGSHYIANNKKM

SEQ ID NO: 722 - protein, 200 aa, Homo sapiens
MAFTEHSPLTPHRRDLCSRSIWLARKIRSDLTALTESYVKHQGLNKNINLDSADGMPVASTDQWSELTEAERLQENLQAYRTFHVLLARLLEDQQVHFTPTEGDFHQAIHTLLLQVAAFAYQIEELMILLEYKIPRNEANGMPINVGDGGLFEKKLWGLKVLQELSQWTVRSIHDLRFISSHQTGIPARGSHYIANNKKM

SEQ ID NO: 723 - protein, 200 aa, Homo sapiens
MAFTEHSPLTPHRRDLCSRSIWLARKIRSDLTALTESYVKHQGLNKNINLDSADGMPVASTDQWSELTEAERLQENLQAYRTFHVLLARLLEDQQVHFTPTEGDFHQAIHTLLLQVAAFAYQIEELMILLEYKIPRNEADGMSINVGDGGLFEKKLWGLKVLQELSQWTVRSIHDLRFISSHQTGIPARGSHYIANNKKM

SEQ ID NO: 724 - protein, 200 aa, Homo sapiens
MAFTEHSPLTPHRRDLCSRSIWLARKIRSDLTALTESYVKHQGLNKNINLDSADGMPVASTDQWSELTEAERLQENLQAYRTFHVLLARLLEDQQVHFTPTEGDFHQAIHTLLLQVAAFAYQIEELMILLEYKIPRNEADGMAINVGDGGLFEKKLWGLKVLQELSQWTVRSIHDLRFISSHQTGIPARGSHYIANNKKM

SEQ ID NO: 725 - protein, 200 aa, Homo sapiens
MAFTEHSPLTPHRRDLCSRSIWLARKIRSDLTALTESYVKHQGLNKNINLDSADGMPVASTDQWSELTEAERLQENLQAYRTFHVLLARLLEDQQVHFTPTEGDFHQAIHTLLLQVAAFAYQIEELMILLEYKIPRNEADGMPINVGQGGLFEKKLWGLKVLQELSQWTVRSIHDLRFISSHQTGIPARGSHYIANNKKM

SEQ ID NO: 726 - protein, 200 aa, Homo sapiens
MAFTEHSPLTPHRRDLCSRSIWLARKIRSDLTALTESYVKHQGLNKNINLDSADGMPVASTDQWSELTEAERLQENLQAYRTFHVLLARLLEDQQVHFTPTEGDFHQAIHTLLLQVAAFAYQIEELMILLEYKIPRNEADGMPINVGNGGLFEKKLWGLKVLQELSQWTVRSIHDLRFISSHQTGIPARGSHYIANNKKM

SEQ ID NO: 727 - protein, 200 aa, Homo sapiens
MAFTEHSPLTPHRRDLCSRSIWLARKIRSDLTALTESYVKHQGLNKNINLDSADGMPVASTDQWSELTEAERLQENLQAYRTFHVLLARLLEDQQVHFTPTEGDFHQAIHTLLLQVAAFAYQIEELMILLEYKIPRNEADGMPINVGDGGVFEKKLWGLKVLQELSQWTVRSIHDLRFISSHQTGIPARGSHYIANNKKM

SEQ ID NO: 728 - protein, 200 aa, Homo sapiens
MAFTEHSPLTPHRRDLCSRSIWLARKIRSDLTALTESYVKHQGLNKNINLDSADGMPVASTDQWSELTEAERLQENLQAYRTFHVLLARLLEDQQVHFTPTEGDFHQAIHTLLLQVAAFAYQIEELMILLEYKIPRNEADGMPINVGDGGIFEKKLWGLKVLQELSQWTVRSIHDLRFISSHQTGIPARGSHYIANNKKM

SEQ ID NO: 729 - protein, 180 aa, Homo sapiens
SPLPITPVNATCAIRHPCHNNLMNQIRSQLAQLNGSANALFILYYTAQGEPFPNNLDKLCGPNVTDFPSFHANGTEKAKLVELYRIVVYLGTSLGNITRDQKILNPSALSLHSKLNATADILRGLLSNVLCRLCSKYHVGHVDVTYGPDTSGKDVFQKKKLGCQLLGKYKQIIAVLAQAF

SEQ ID NO: 730 - protein, 180 aa, Homo sapiens
SPLPITPVNATCAIRHPCHNNLMNQIRSQLAQLNGSANALFILYYTAQGEPFPNNLDKLCGPNVTDFPAFHANGTEKAKLVELYRIVVYLGTSLGNITRDQKILNPSALSLHSKLNATADILRGLLSNVLCRLCSKYHVGHVDVTYGPDTSGKDVFQKKKLGCQLLGKYKQIIAVLAQAF

SEQ ID NO: 731 - protein, 180 aa, Homo sapiens
SPLPITPVNATCAIRHPCHNNLMNQIRSQLAQLNGSANALFILYYTAQGEPFPNNLDKLCGPNVTDFPPIHANGTEKAKLVELYRIVVYLGTSLGNITRDQKILNPSALSLHSKLNATADILRGLLSNVLCRLCSKYHVGHVDVTYGPDTSGKDVFQKKKLGCQLLGKYKQIIAVLAQAF

SEQ ID NO: 732 - protein, 180 aa, Homo sapiens
SPLPITPVNATCAIRHPCHNNLMNQIRSQLAQLNGSANALFILYYTAQGEPFPNNLDKLCGPNVTDFPPVHANGTEKAKLVELYRIVVYLGTSLGNITRDQKILNPSALSLHSKLNATADILRGLLSNVLCRLCSKYHVGHVDVTYGPDTSGKDVFQKKKLGCQLLGKYKQIIAVLAQAF

SEQ ID NO: 733 - protein, 180 aa, Homo sapiens
SPLPITPVNATCAIRHPCHNNLMNQIRSQLAQLNGSANALFILYYTAQGEPFPNNLDKLCGPNVTDFPPFHANGTEKAKLVELYHIVVYLGTSLGNITRDQKILNPSALSLHSKLNATADILRGLLSNVLCRLCSKYHVGHVDVTYGPDTSGKDVFQKKKLGCQLLGKYKQIIAVLAQAF

SEQ ID NO: 734 - protein, 180 aa, Homo sapiens
SPLPITPVNATCAIRHPCHNNLMNQIRSQLAQLNGSANALFILYYTAQGEPFPNNLDKLCGPNVTDFPPFHANGTEKAKLVELYQIVVYLGTSLGNITRDQKILNPSALSLHSKLNATADILRGLLSNVLCRLCSKYHVGHVDVTYGPDTSGKDVFQKKKLGCQLLGKYKQIIAVLAQAF

SEQ ID NO: 735 - protein, 180 aa, Homo sapiens
SPLPITPVNATCAIRHPCHNNLMNQIRSQLAQLNGSANALFILYYTAQGEPFPNNLDKLCGPNVTDFPPFHANGTEKAKLVELYRIVVYLGTSLGNITHDQKILNPSALSLHSKLNATADILRGLLSNVLCRLCSKYHVGHVDVTYGPDTSGKDVFQKKKLGCQLLGKYKQIIAVLAQAF

SEQ ID NO: 736 - protein, 180 aa, Homo sapiens
SPLPITPVNATCAIRHPCHNNLMNQIRSQLAQLNGSANALFILYYTAQGEPFPNNLDKLCGPNVTDFPPFHANGTEKAKLVELYRIVVYLGTSLGNITQDQKILNPSALSLHSKLNATADILRGLLSNVLCRLCSKYHVGHVDVTYGPDTSGKDVFQKKKLGCQLLGKYKQIIAVLAQAF

SEQ ID NO: 737 - protein, 180 aa, Homo sapiens
SPLPITPVNATCAIRHPCHNNLMNQIRSQLAQLNGSANALFILYYTAQGEPFPNNLDKLCGPNVTDFPPFHANGTEKAKLVELYRIVVYLGTSLGNITRDQQILNPSALSLHSKLNATADILRGLLSNVLCRLCSKYHVGHVDVTYGPDTSGKDVFQKKKLGCQLLGKYKQIIAVLAQAF

SEQ ID NO: 738 - protein, 180 aa, Homo sapiens
SPLPITPVNATCAIRHPCHNNLMNQIRSQLAQLNGSANALFILYYTAQGEPFPNNLDKLCGPNVTDFPPFHANGTEKAKLVELYRIVVYLGTSLGNITRDQNILNPSALSLHSKLNATADILRGLLSNVLCRLCSKYHVGHVDVTYGPDTSGKDVFQKKKLGCQLLGKYKQIIAVLAQAF

SEQ ID NO: 739 - protein, 180 aa, Homo sapiens
SPLPITPVNATCAIRHPCHNNLMNQIRSQLAQLNGSANALFILYYTAQGEPFPNNLDKLCGPNVTDFPPFHANGTEKAKLVELYRIVVYLGTSLGNITRDQKIVNPSALSLHSKLNATADILRGLLSNVLCRLCSKYHVGHVDVTYGPDTSGKDVFQKKKLGCQLLGKYKQIIAVLAQAF

SEQ ID NO: 740 - protein, 180 aa, Homo sapiens
SPLPITPVNATCAIRHPCHNNLMNQIRSQLAQLNGSANALFILYYTAQGEPFPNNLDKLCGPNVTDFPPFHANGTEKAKLVELYRIVVYLGTSLGNITRDQKIINPSALSLHSKLNATADILRGLLSNVLCRLCSKYHVGHVDVTYGPDTSGKDVFQKKKLGCQLLGKYKQIIAVLAQAF

SEQ ID NO: 741 - protein, 180 aa, Homo sapiens
SPLPITPVNATCAIRHPCHNNLMNQIRSQLAQLNGSANALFILYYTAQGEPFPNNLDKLCGPNVTDFPPFHANGTEKAKLVELYRIVVYLGTSLGNITRDQKILNSSALSLHSKLNATADILRGLLSNVLCRLCSKYHVGHVDVTYGPDTSGKDVFQKKKLGCQLLGKYKQIIAVLAQAF

SEQ ID NO: 742 - protein, 180 aa, Homo sapiens
SPLPITPVNATCAIRHPCHNNLMNQIRSQLAQLNGSANALFILYYTAQGEPFPNNLDKLCGPNVTDFPPFHANGTEKAKLVELYRIVVYLGTSLGNITRDQKILNASALSLHSKLNATADILRGLLSNVLCRLCSKYHVGHVDVTYGPDTSGKDVFQKKKLGCQLLGKYKQIIAVLAQAF

SEQ ID NO: 743 - protein, 180 aa, Homo sapiens
SPLPITPVNATCAIRHPCHNNLMNQIRSQLAQLNGSANALFILYYTAQGEPFPNNLDKLCGPNVTDFPPFHANGTEKAKLVELYRIVVYLGTSLGNITRDQKILNPSAVSLHSKLNATADILRGLLSNVLCRLCSKYHVGHVDVTYGPDTSGKDVFQKKKLGCQLLGKYKQIIAVLAQAF

SEQ ID NO: 744 - protein, 180 aa, Homo sapiens
SPLPITPVNATCAIRHPCHNNLMNQIRSQLAQLNGSANALFILYYTAQGEPFPNNLDKLCGPNVTDFPPFHANGTEKAKLVELYRIVVYLGTSLGNITRDQKILNPSAISLHSKLNATADILRGLLSNVLCRLCSKYHVGHVDVTYGPDTSGKDVFQKKKLGCQLLGKYKQIIAVLAQAF

SEQ ID NO: 745 - protein, 180 aa, Homo sapiens
SPLPITPVNATCAIRHPCHNNLMNQIRSQLAQLNGSANALFILYYTAQGEPFPNNLDKLCGPNVTDFPPFHANGTEKAKLVELYRIVVYLGTSLGNITRDQKILNPSALSLHSKLNATADILRGLLSNVLCRLCSKHHVGHVDVTYGPDTSGKDVFQKKKLGCQLLGKYKQIIAVLAQAF

SEQ ID NO: 746 - protein, 180 aa, Homo sapiens
SPLPITPVNATCAIRHPCHNNLMNQIRSQLAQLNGSANALFILYYTAQGEPFPNNLDKLCGPNVTDFPPFHANGTEKAKLVELYRIVVYLGTSLGNITRDQKILNPSALSLHSKLNATADILRGLLSNVLCRLCSKIHVGHVDVTYGPDTSGKDVFQKKKLGCQLLGKYKQIIAVLAQAF

SEQ ID NO: 747 - protein, 180 aa, Homo sapiens
SPLPITPVNATCAIRHPCHNNLMNQIRSQLAQLNGSANALFILYYTAQGEPFPNNLDKLCGPNVTDFPPFHANGTEKAKLVELYRIVVYLGTSLGNITRDQKILNPSALSLHSKLNATADILRGLLSNVLCRLCSKYHVGHVQVTYGPDTSGKDVFQKKKLGCQLLGKYKQIIAVLAQAF

SEQ ID NO: 748 - protein, 180 aa, Homo sapiens
SPLPITPVNATCAIRHPCHNNLMNQIRSQLAQLNGSANALFILYYTAQGEPFPNNLDKLCGPNVTDFPPFHANGTEKAKLVELYRIVVYLGTSLGNITRDQKILNPSALSLHSKLNATADILRGLLSNVLCRLCSKYHVGHVNVTYGPDTSGKDVFQKKKLGCQLLGKYKQIIAVLAQAF

SEQ ID NO: 749 - protein, 180 aa, Homo sapiens
SPLPITPVNATCAIRHPCHNNLMNQIRSQLAQLNGSANALFILYYTAQGEPFPNNLDKLCGPNVTDFPPFHANGTEKAKLVELYRIVVYLGTSLGNITRDQKILNPSALSLHSKLNATADILRGLLSNVLCRLCSKYHVGHVDVTHGPDTSGKDVFQKKKLGCQLLGKYKQIIAVLAQAF

SEQ ID NO: 750 - protein, 180 aa, Homo sapiens
SPLPITPVNATCAIRHPCHNNLMNQIRSQLAQLNGSANALFILYYTAQGEPFPNNLDKLCGPNVTDFPPFHANGTEKAKLVELYRIVVYLGTSLGNITRDQKILNPSALSLHSKLNATADILRGLLSNVLCRLCSKYHVGHVDVTIGPDTSGKDVFQKKKLGCQLLGKYKQIIAVLAQAF

SEQ ID NO: 751 - protein, 180 aa, Homo sapiens
SPLPITPVNATCAIRHPCHNNLMNQIRSQLAQLNGSANALFILYYTAQGEPFPNNLDKLCGPNVTDFPPFHANGTEKAKLVELYRIVVYLGTSLGNITRDQKILNPSALSLHSKLNATADILRGLLSNVLCRLCSKYHVGHVDVTYGSDTSGKDVFQKKKLGCQLLGKYKQIIAVLAQAF

SEQ ID NO: 752 - protein, 180 aa, Homo sapiens
SPLPITPVNATCAIRHPCHNNLMNQIRSQLAQLNGSANALFILYYTAQGEPFPNNLDKLCGPNVTDFPPFHANGTEKAKLVELYRIVVYLGTSLGNITRDQKILNPSALSLHSKLNATADILRGLLSNVLCRLCSKYHVGHVDVTYGADTSGKDVFQKKKLGCQLLGKYKQIIAVLAQAF

SEQ ID NO: 753 - protein, 180 aa, Homo sapiens
SPLPITPVNATCAIRHPCHNNLMNQIRSQLAQLNGSANALFILYYTAQGEPFPNNLDKLCGPNVTDFPPFHANGTEKAKLVELYRIVVYLGTSLGNITRDQKILNPSALSLHSKLNATADILRGLLSNVLCRLCSKYHVGHVDVTYGPQTSGKDVFQKKKLGCQLLGKYKQIIAVLAQAF

SEQ ID NO: 754 - protein, 180 aa, Homo sapiens
SPLPITPVNATCAIRHPCHNNLMNQIRSQLAQLNGSANALFILYYTAQGEPFPNNLDKLCGPNVTDFPPFHANGTEKAKLVELYRIVVYLGTSLGNITRDQKILNPSALSLHSKLNATADILRGLLSNVLCRLCSKYHVGHVDVTYGPNTSGKDVFQKKKLGCQLLGKYKQIIAVLAQAF

SEQ ID NO: 755 - protein, 180 aa, Homo sapiens
SPLPITPVNATCAIRHPCHNNLMNQIRSQLAQLNGSANALFILYYTAQGEPFPNNLDKLCGPNVTDFPPFHANGTEKAKLVELYRIVVYLGTSLGNITRDQKILNPSALSLHSKLNATADILRGLLSNVLCRLCSKYHVGHVDVTYGPDTSGQDVFQKKKLGCQLLGKYKQIIAVLAQAF

SEQ ID NO: 756 - protein, 180 aa, Homo sapiens
SPLPITPVNATCAIRHPCHNNLMNQIRSQLAQLNGSANALFILYYTAQGEPFPNNLDKLCGPNVTDFPPFHANGTEKAKLVELYRIVVYLGTSLGNITRDQKILNPSALSLHSKLNATADILRGLLSNVLCRLCSKYHVGHVDVTYGPDTSGNDVFQKKKLGCQLLGKYKQIIAVLAQAF

SEQ ID NO: 757 - protein, 180 aa, Homo sapiens
SPLPITPVNATCAIRHPCHNNLMNQIRSQLAQLNGSANALFILYYTAQGEPFPNNLDKLCGPNVTDFPPFHANGTEKAKLVELYRIVVYLGTSLGNITRDQKILNPSALSLHSKLNATADILRGLLSNVLCRLCSKYHVGHVDVTYGPDTSGKQVFQKKKLGCQLLGKYKQIIAVLAQAF

SEQ ID NO: 758 - protein, 180 aa, Homo sapiens
SPLPITPVNATCAIRHPCHNNLMNQIRSQLAQLNGSANALFILYYTAQGEPFPNNLDKLCGPNVTDFPPFHANGTEKAKLVELYRIVVYLGTSLGNITRDQKILNPSALSLHSKLNATADILRGLLSNVLCRLCSKYHVGHVDVTYGPDTSGKNVFQKKKLGCQLLGKYKQIIAVLAQAF

SEQ ID NO: 759 - protein, 180 aa, Homo sapiens
SPLPITPVNATCAIRHPCHNNLMNQIRSQLAQLNGSANALFILYYTAQGEPFPNNLDKLCGPNVTDFPPFHANGTEKAKLVELYRIVVYLGTSLGNITRDQKILNPSALSLHSKLNATADILRGLLSNVLCRLCSKYHVGHVDVTYGPDTSGKDVIQKKKLGCQLLGKYKQIIAVLAQAF

SEQ ID NO: 760 - protein, 180 aa, Homo sapiens
SPLPITPVNATCAIRHPCHNNLMNQIRSQLAQLNGSANALFILYYTAQGEPFPNNLDKLCGPNVTDFPPFHANGTEKAKLVELYRIVVYLGTSLGNITRDQKILNPSALSLHSKLNATADILRGLLSNVLCRLCSKYHVGHVDVTYGPDTSGKDVVQKKKLGCQLLGKYKQIIAVLAQAF

SEQ ID NO: 761 - protein, 227 aa, Homo sapiens
AAIGSCSKEYRVLLGQLQKQTDLMQDTSRLLDPYIRIQGLDVPKLREHCRERPGAFPSQETLRGLGRRGFLQTLNATLGCVLHRLADLEQRLPKAQDLERSGLNIEDLEKLQMARPNILGLRNNIYCMAQLLDNSDTAEPTKAGRGASQPPTPTPASDAFQRKLEGCRFLHGYHRFMHSVGRVFSKWGESPNRSRRHSPHQALRKGVRRTRPSRKGKRLMTRGQLPR

SEQ ID NO: 762 - protein, 227 aa, Homo sapiens
AAIGSCSKEYRVLLGQLQKQTDLMQDTSRLLDPYIRIQGLDVPKLREHCRERPGAFPSNETLRGLGRRGFLQTLNATLGCVLHRLADLEQRLPKAQDLERSGLNIEDLEKLQMARPNILGLRNNIYCMAQLLDNSDTAEPTKAGRGASQPPTPTPASDAFQRKLEGCRFLHGYHRFMHSVGRVFSKWGESPNRSRRHSPHQALRKGVRRTRPSRKGKRLMTRGQLPR

SEQ ID NO: 763 - protein, 227 aa, Homo sapiens
AAIGSCSKEYRVLLGQLQKQTDLMQDTSRLLDPYIRIQGLDVPKLREHCRERPGAFPSHETLRGLGRRGFLQTLNATLGCVLHRLADLEQRLPKAQDLERSGLNIEDLEKLQMARPNILGLRNNIYCMAQLLDNSDTAEPTKAGRGASQPPTPTPASDAFQRKLEGCRFLHGYHRFMHSVGRVFSKWGESPNRSRRHSPHQALRKGVRRTRPSRKGKRLMTRGQLPR

SEQ ID NO: 764 - protein, 227 aa, Homo sapiens
AAIGSCSKEYRVLLGQLQKQTDLMQDTSRLLDPYIRIQGLDVPKLREHCRERPGAFPSEQTLRGLGRRGFLQTLNATLGCVLHRLADLEQRLPKAQDLERSGLNIEDLEKLQMARPNILGLRNNIYCMAQLLDNSDTAEPTKAGRGASQPPTPTPASDAFQRKLEGCRFLHGYHRFMHSVGRVFSKWGESPNRSRRHSPHQALRKGVRRTRPSRKGKRLMTRGQLPR

SEQ ID NO: 765 - protein, 227 aa, Homo sapiens
AAIGSCSKEYRVLLGQLQKQTDLMQDTSRLLDPYIRIQGLDVPKLREHCRERPGAFPSENTLRGLGRRGFLQTLNATLGCVLHRLADLEQRLPKAQDLERSGLNIEDLEKLQMARPNILGLRNNIYCMAQLLDNSDTAEPTKAGRGASQPPTPTPASDAFQRKLEGCRFLHGYHRFMHSVGRVFSKWGESPNRSRRHSPHQALRKGVRRTRPSRKGKRLMTRGQLPR

SEQ ID NO: 766 - protein, 227 aa, Homo sapiens
AAIGSCSKEYRVLLGQLQKQTDLMQDTSRLLDPYIRIQGLDVPKLREHCRERPGAFPSEHTLRGLGRRGFLQTLNATLGCVLHRLADLEQRLPKAQDLERSGLNIEDLEKLQMARPNILGLRNNIYCMAQLLDNSDTAEPTKAGRGASQPPTPTPASDAFQRKLEGCRFLHGYHRFMHSVGRVFSKWGESPNRSRRHSPHQALRKGVRRTRPSRKGKRLMTRGQLPR

SEQ ID NO: 767 - protein, 227 aa, Homo sapiens
AAIGSCSKEYRVLLGQLQKQTDLMQDTSRLLDPYIRIQGLDVPKLREHCRERPGAFPSEETLHGLGRRGFLQTLNATLGCVLHRLADLEQRLPKAQDLERSGLNIEDLEKLQMARPNILGLRNNIYCMAQLLDNSDTAEPTKAGRGASQPPTPTPASDAFQRKLEGCRFLHGYHRFMHSVGRVFSKWGESPNRSRRHSPHQALRKGVRRTRPSRKGKRLMTRGQLPR

SEQ ID NO: 768 - protein, 227 aa, Homo sapiens
AAIGSCSKEYRVLLGQLQKQTDLMQDTSRLLDPYIRIQGLDVPKLREHCRERPGAFPSEETLQGLGRRGFLQTLNATLGCVLHRLADLEQRLPKAQDLERSGLNIEDLEKLQMARPNILGLRNNIYCMAQLLDNSDTAEPTKAGRGASQPPTPTPASDAFQRKLEGCRFLHGYHRFMHSVGRVFSKWGESPNRSRRHSPHQALRKGVRRTRPSRKGKRLMTRGQLPR

SEQ ID NO: 769 - protein, 227 aa, Homo sapiens
AAIGSCSKEYRVLLGQLQKQTDLMQDTSRLLDPYIRIQGLDVPKLREHCRERPGAFPSEETLRGVGRRGFLQTLNATLGCVLHRLADLEQRLPKAQDLERSGLNIEDLEKLQMARPNILGLRNNIYCMAQLLDNSDTAEPTKAGRGASQPPTPTPASDAFQRKLEGCRFLHGYHRFMHSVGRVFSKWGESPNRSRRHSPHQALRKGVRRTRPSRKGKRLMTRGQLPR

SEQ ID NO: 770 - protein, 227 aa, Homo sapiens
AAIGSCSKEYRVLLGQLQKQTDLMQDTSRLLDPYIRIQGLDVPKLREHCRERPGAFPSEETLRGIGRRGFLQTLNATLGCVLHRLADLEQRLPKAQDLERSGLNIEDLEKLQMARPNILGLRNNIYCMAQLLDNSDTAEPTKAGRGASQPPTPTPASDAFQRKLEGCRFLHGYHRFMHSVGRVFSKWGESPNRSRRHSPHQALRKGVRRTRPSRKGKRLMTRGQLPR

SEQ ID NO: 771 - protein, 227 aa, Homo sapiens
AAIGSCSKEYRVLLGQLQKQTDLMQDTSRLLDPYIRIQGLDVPKLREHCRERPGAFPSEETLRGLGRRGFLQTLNATLGCVLHHLADLEQRLPKAQDLERSGLNIEDLEKLQMARPNILGLRNNIYCMAQLLDNSDTAEPTKAGRGASQPPTPTPASDAFQRKLEGCRFLHGYHRFMHSVGRVFSKWGESPNRSRRHSPHQALRKGVRRTRPSRKGKRLMTRGQLPR

SEQ ID NO: 772 - protein, 227 aa, Homo sapiens
AAIGSCSKEYRVLLGQLQKQTDLMQDTSRLLDPYIRIQGLDVPKLREHCRERPGAFPSEETLRGLGRRGFLQTLNATLGCVLHQLADLEQRLPKAQDLERSGLNIEDLEKLQMARPNILGLRNNIYCMAQLLDNSDTAEPTKAGRGASQPPTPTPASDAFQRKLEGCRFLHGYHRFMHSVGRVFSKWGESPNRSRRHSPHQALRKGVRRTRPSRKGKRLMTRGQLPR

SEQ ID NO: 773 - protein, 227 aa, Homo sapiens
AAIGSCSKEYRVLLGQLQKQTDLMQDTSRLLDPYIRIQGLDVPKLREHCRERPGAFPSEETLRGLGRRGFLQTLNATLGCVLHRLAQLEQRLPKAQDLERSGLNIEDLEKLQMARPNILGLRNNIYCMAQLLDNSDTAEPTKAGRGASQPPTPTPASDAFQRKLEGCRFLHGYHRFMHSVGRVFSKWGESPNRSRRHSPHQALRKGVRRTRPSRKGKRLMTRGQLPR

SEQ ID NO: 774 - protein, 227 aa, Homo sapiens
AAIGSCSKEYRVLLGQLQKQTDLMQDTSRLLDPYIRIQGLDVPKLREHCRERPGAFPSEETLRGLGRRGFLQTLNATLGCVLHRLANLEQRLPKAQDLERSGLNIEDLEKLQMARPNILGLRNNIYCMAQLLDNSDTAEPTKAGRGASQPPTPTPASDAFQRKLEGCRFLHGYHRFMHSVGRVFSKWGESPNRSRRHSPHQALRKGVRRTRPSRKGKRLMTRGQLPR

SEQ ID NO: 775 - protein, 227 aa, Homo sapiens
AAIGSCSKEYRVLLGQLQKQTDLMQDTSRLLDPYIRIQGLDVPKLREHCRERPGAFPSEETLRGLGRRGFLQTLNATLGCVLHRLADLQQRLPKAQDLERSGLNIEDLEKLQMARPNILGLRNNIYCMAQLLDNSDTAEPTKAGRGASQPPTPTPASDAFQRKLEGCRFLHGYHRFMHSVGRVFSKWGESPNRSRRHSPHQALRKGVRRTRPSRKGKRLMTRGQLPR

SEQ ID NO: 776 - protein, 227 aa, Homo sapiens
AAIGSCSKEYRVLLGQLQKQTDLMQDTSRLLDPYIRIQGLDVPKLREHCRERPGAFPSEETLRGLGRRGFLQTLNATLGCVLHRLADLNQRLPKAQDLERSGLNIEDLEKLQMARPNILGLRNNIYCMAQLLDNSDTAEPTKAGRGASQPPTPTPASDAFQRKLEGCRFLHGYHRFMHSVGRVFSKWGESPNRSRRHSPHQALRKGVRRTRPSRKGKRLMTRGQLPR

SEQ ID NO: 777 - protein, 227 aa, Homo sapiens
AAIGSCSKEYRVLLGQLQKQTDLMQDTSRLLDPYIRIQGLDVPKLREHCRERPGAFPSEETLRGLGRRGFLQTLNATLGCVLHRLADLHQRLPKAQDLERSGLNIEDLEKLQMARPNILGLRNNIYCMAQLLDNSDTAEPTKAGRGASQPPTPTPASDAFQRKLEGCRFLHGYHRFMHSVGRVFSKWGESPNRSRRHSPHQALRKGVRRTRPSRKGKRLMTRGQLPR

SEQ ID NO: 778 - protein, 227 aa, Homo sapiens
AAIGSCSKEYRVLLGQLQKQTDLMQDTSRLLDPYIRIQGLDVPKLREHCRERPGAFPSEETLRGLGRRGFLQTLNATLGCVLHRLADLEQHLPKAQDLERSGLNIEDLEKLQMARPNILGLRNNIYCMAQLLDNSDTAEPTKAGRGASQPPTPTPASDAFQRKLEGCRFLHGYHRFMHSVGRVFSKWGESPNRSRRHSPHQALRKGVRRTRPSRKGKRLMTRGQLPR

SEQ ID NO: 779 - protein, 227 aa, Homo sapiens
AAIGSCSKEYRVLLGQLQKQTDLMQDTSRLLDPYIRIQGLDVPKLREHCRERPGAFPSEETLRGLGRRGFLQTLNATLGCVLHRLADLEQQLPKAQDLERSGLNIEDLEKLQMARPNILGLRNNIYCMAQLLDNSDTAEPTKAGRGASQPPTPTPASDAFQRKLEGCRFLHGYHRFMHSVGRVFSKWGESPNRSRRHSPHQALRKGVRRTRPSRKGKRLMTRGQLPR

SEQ ID NO: 780 - protein, 227 aa, Homo sapiens
AAIGSCSKEYRVLLGQLQKQTDLMQDTSRLLDPYIRIQGLDVPKLREHCRERPGAFPSEETLRGLGRRGFLQTLNATLGCVLHRLADLEQRLPQAQDLERSGLNIEDLEKLQMARPNILGLRNNIYCMAQLLDNSDTAEPTKAGRGASQPPTPTPASDAFQRKLEGCRFLHGYHRFMHSVGRVFSKWGESPNRSRRHSPHQALRKGVRRTRPSRKGKRLMTRGQLPR

SEQ ID NO: 781 - protein, 227 aa, Homo sapiens
AAIGSCSKEYRVLLGQLQKQTDLMQDTSRLLDPYIRIQGLDVPKLREHCRERPGAFPSEETLRGLGRRGFLQTLNATLGCVLHRLADLEQRLPNAQDLERSGLNIEDLEKLQMARPNILGLRNNIYCMAQLLDNSDTAEPTKAGRGASQPPTPTPASDAFQRKLEGCRFLHGYHRFMHSVGRVFSKWGESPNRSRRHSPHQALRKGVRRTRPSRKGKRLMTRGQLPR

SEQ ID NO: 782 - protein, 227 aa, Homo sapiens
AAIGSCSKEYRVLLGQLQKQTDLMQDTSRLLDPYIRIQGLDVPKLREHCRERPGAFPSEETLRGLGRRGFLQTLNATLGCVLHRLADLEQRLPKAQQLERSGLNIEDLEKLQMARPNILGLRNNIYCMAQLLDNSDTAEPTKAGRGASQPPTPTPASDAFQRKLEGCRFLHGYHRFMHSVGRVFSKWGESPNRSRRHSPHQALRKGVRRTRPSRKGKRLMTRGQLPR

SEQ ID NO: 783 - protein, 227 aa, Homo sapiens
AAIGSCSKEYRVLLGQLQKQTDLMQDTSRLLDPYIRIQGLDVPKLREHCRERPGAFPSEETLRGLGRRGFLQTLNATLGCVLHRLADLEQRLPKAQNLERSGLNIEDLEKLQMARPNILGLRNNIYCMAQLLDNSDTAEPTKAGRGASQPPTPTPASDAFQRKLEGCRFLHGYHRFMHSVGRVFSKWGESPNRSRRHSPHQALRKGVRRTRPSRKGKRLMTRGQLPR

SEQ ID NO: 784 - protein, 227 aa, Homo sapiens
AAIGSCSKEYRVLLGQLQKQTDLMQDTSRLLDPYIRIQGLDVPKLREHCRERPGAFPSEETLRGLGRRGFLQTLNATLGCVLHRLADLEQRLPKAQDLQRSGLNIEDLEKLQMARPNILGLRNNIYCMAQLLDNSDTAEPTKAGRGASQPPTPTPASDAFQRKLEGCRFLHGYHRFMHSVGRVFSKWGESPNRSRRHSPHQALRKGVRRTRPSRKGKRLMTRGQLPR

SEQ ID NO: 785 - protein, 227 aa, Homo sapiens
AAIGSCSKEYRVLLGQLQKQTDLMQDTSRLLDPYIRIQGLDVPKLREHCRERPGAFPSEETLRGLGRRGFLQTLNATLGCVLHRLADLEQRLPKAQDLNRSGLNIEDLEKLQMARPNILGLRNNIYCMAQLLDNSDTAEPTKAGRGASQPPTPTPASDAFQRKLEGCRFLHGYHRFMHSVGRVFSKWGESPNRSRRHSPHQALRKGVRRTRPSRKGKRLMTRGQLPR

SEQ ID NO: 786 - protein, 227 aa, Homo sapiens
AAIGSCSKEYRVLLGQLQKQTDLMQDTSRLLDPYIRIQGLDVPKLREHCRERPGAFPSEETLRGLGRRGFLQTLNATLGCVLHRLADLEQRLPKAQDLHRSGLNIEDLEKLQMARPNILGLRNNIYCMAQLLDNSDTAEPTKAGRGASQPPTPTPASDAFQRKLEGCRFLHGYHRFMHSVGRVFSKWGESPNRSRRHSPHQALRKGVRRTRPSRKGKRLMTRGQLPR

SEQ ID NO: 787 - protein, 227 aa, Homo sapiens
AAIGSCSKEYRVLLGQLQKQTDLMQDTSRLLDPYIRIQGLDVPKLREHCRERPGAFPSEETLRGLGRRGFLQTLNATLGCVLHRLADLEQRLPKAQDLEHSGLNIEDLEKLQMARPNILGLRNNIYCMAQLLDNSDTAEPTKAGRGASQPPTPTPASDAFQRKLEGCRFLHGYHRFMHSVGRVFSKWGESPNRSRRHSPHQALRKGVRRTRPSRKGKRLMTRGQLPR

SEQ ID NO: 788 - protein, 227 aa, Homo sapiens
AAIGSCSKEYRVLLGQLQKQTDLMQDTSRLLDPYIRIQGLDVPKLREHCRERPGAFPSEETLRGLGRRGFLQTLNATLGCVLHRLADLEQRLPKAQDLEQSGLNIEDLEKLQMARPNILGLRNNIYCMAQLLDNSDTAEPTKAGRGASQPPTPTPASDAFQRKLEGCRFLHGYHRFMHSVGRVFSKWGESPNRSRRHSPHQALRKGVRRTRPSRKGKRLMTRGQLPR

SEQ ID NO: 789 - protein, 227 aa, Homo sapiens
AAIGSCSKEYRVLLGQLQKQTDLMQDTSRLLDPYIRIQGLDVPKLREHCRERPGAFPSEETLRGLGRRGFLQTLNATLGCVLHRLADLEQRLPKAQDLERSGVNIEDLEKLQMARPNILGLRNNIYCMAQLLDNSDTAEPTKAGRGASQPPTPTPASDAFQRKLEGCRFLHGYHRFMHSVGRVFSKWGESPNRSRRHSPHQALRKGVRRTRPSRKGKRLMTRGQLPR

SEQ ID NO: 790 - protein, 227 aa, Homo sapiens
AAIGSCSKEYRVLLGQLQKQTDLMQDTSRLLDPYIRIQGLDVPKLREHCRERPGAFPSEETLRGLGRRGFLQTLNATLGCVLHRLADLEQRLPKAQDLERSGINIEDLEKLQMARPNILGLRNNIYCMAQLLDNSDTAEPTKAGRGASQPPTPTPASDAFQRKLEGCRFLHGYHRFMHSVGRVFSKWGESPNRSRRHSPHQALRKGVRRTRPSRKGKRLMTRGQLPR

SEQ ID NO: 791 - protein, 227 aa, Homo sapiens
AAIGSCSKEYRVLLGQLQKQTDLMQDTSRLLDPYIRIQGLDVPKLREHCRERPGAFPSEETLRGLGRRGFLQTLNATLGCVLHRLADLEQRLPKAQDLERSGLNIQDLEKLQMARPNILGLRNNIYCMAQLLDNSDTAEPTKAGRGASQPPTPTPASDAFQRKLEGCRFLHGYHRFMHSVGRVFSKWGESPNRSRRHSPHQALRKGVRRTRPSRKGKRLMTRGQLPR

SEQ ID NO: 792 - protein, 227 aa, Homo sapiens
AAIGSCSKEYRVLLGQLQKQTDLMQDTSRLLDPYIRIQGLDVPKLREHCRERPGAFPSEETLRGLGRRGFLQTLNATLGCVLHRLADLEQRLPKAQDLERSGLNINDLEKLQMARPNILGLRNNIYCMAQLLDNSDTAEPTKAGRGASQPPTPTPASDAFQRKLEGCRFLHGYHRFMHSVGRVFSKWGESPNRSRRHSPHQALRKGVRRTRPSRKGKRLMTRGQLPR

SEQ ID NO: 793 - protein, 227 aa, Homo sapiens
AAIGSCSKEYRVLLGQLQKQTDLMQDTSRLLDPYIRIQGLDVPKLREHCRERPGAFPSEETLRGLGRRGFLQTLNATLGCVLHRLADLEQRLPKAQDLERSGLNIHDLEKLQMARPNILGLRNNIYCMAQLLDNSDTAEPTKAGRGASQPPTPTPASDAFQRKLEGCRFLHGYHRFMHSVGRVFSKWGESPNRSRRHSPHQALRKGVRRTRPSRKGKRLMTRGQLPR

SEQ ID NO: 794 - protein, 197 aa, Homo sapiens
RNLPVATPDPGMFPCLHHSQNLLRAVSNMLQKARQTLEFYPCTSEEIDHEDITKDQTSTVEACLPLELTKNESCLNSRETSFITNGSCLASRKTSFMMALCLSSIYEDLKMYQVEFKTMNAKLLMDPKRQIFLDQNMLAVIDELMQALNFNSETVPQKSSLEEPDFYKTKIKLCILLHAFRIRAVTIDRVMSYLNAS

SEQ ID NO: 795 - protein, 197 aa, Homo sapiens
RNLPVATPDPGMFPCLHHSQNLLRAVSNMLQKARQTLEFYPCTSEEIDHEDITKDNTSTVEACLPLELTKNESCLNSRETSFITNGSCLASRKTSFMMALCLSSIYEDLKMYQVEFKTMNAKLLMDPKRQIFLDQNMLAVIDELMQALNFNSETVPQKSSLEEPDFYKTKIKLCILLHAFRIRAVTIDRVMSYLNAS

SEQ ID NO: 796 - protein, 197 aa, Homo sapiens
RNLPVATPDPGMFPCLHHSQNLLRAVSNMLQKARQTLEFYPCTSEEIDHEDITKDKTSTVQACLPLELTKNESCLNSRETSFITNGSCLASRKTSFMMALCLSSIYEDLKMYQVEFKTMNAKLLMDPKRQIFLDQNMLAVIDELMQALNFNSETVPQKSSLEEPDFYKTKIKLCILLHAFRIRAVTIDRVMSYLNAS

SEQ ID NO: 797 - protein, 197 aa, Homo sapiens
RNLPVATPDPGMFPCLHHSQNLLRAVSNMLQKARQTLEFYPCTSEEIDHEDITKDKTSTVNACLPLELTKNESCLNSRETSFITNGSCLASRKTSFMMALCLSSIYEDLKMYQVEFKTMNAKLLMDPKRQIFLDQNMLAVIDELMQALNFNSETVPQKSSLEEPDFYKTKIKLCILLHAFRIRAVTIDRVMSYLNAS

SEQ ID NO: 798 - protein, 197 aa, Homo sapiens
RNLPVATPDPGMFPCLHHSQNLLRAVSNMLQKARQTLEFYPCTSEEIDHEDITKDKTSTVHACLPLELTKNESCLNSRETSFITNGSCLASRKTSFMMALCLSSIYEDLKMYQVEFKTMNAKLLMDPKRQIFLDQNMLAVIDELMQALNFNSETVPQKSSLEEPDFYKTKIKLCILLHAFRIRAVTIDRVMSYLNAS

SEQ ID NO: 799 - protein, 197 aa, Homo sapiens
RNLPVATPDPGMFPCLHHSQNLLRAVSNMLQKARQTLEFYPCTSEEIDHEDITKDKTSTVEACLPVELTKNESCLNSRETSFITNGSCLASRKTSFMMALCLSSIYEDLKMYQVEFKTMNAKLLMDPKRQIFLDQNMLAVIDELMQALNFNSETVPQKSSLEEPDFYKTKIKLCILLHAFRIRAVTIDRVMSYLNAS

SEQ ID NO: 800 - protein, 197 aa, Homo sapiens
RNLPVATPDPGMFPCLHHSQNLLRAVSNMLQKARQTLEFYPCTSEEIDHEDITKDKTSTVEACLPIELTKNESCLNSRETSFITNGSCLASRKTSFMMALCLSSIYEDLKMYQVEFKTMNAKLLMDPKRQIFLDQNMLAVIDELMQALNFNSETVPQKSSLEEPDFYKTKIKLCILLHAFRIRAVTIDRVMSYLNAS

SEQ ID NO: 801 - protein, 197 aa, Homo sapiens
RNLPVATPDPGMFPCLHHSQNLLRAVSNMLQKARQTLEFYPCTSEEIDHEDITKDKTSTVEACLPLQLTKNESCLNSRETSFITNGSCLASRKTSFMMALCLSSIYEDLKMYQVEFKTMNAKLLMDPKRQIFLDQNMLAVIDELMQALNFNSETVPQKSSLEEPDFYKTKIKLCILLHAFRIRAVTIDRVMSYLNAS

SEQ ID NO: 802 - protein, 197 aa, Homo sapiens
RNLPVATPDPGMFPCLHHSQNLLRAVSNMLQKARQTLEFYPCTSEEIDHEDITKDKTSTVEACLPLNLTKNESCLNSRETSFITNGSCLASRKTSFMMALCLSSIYEDLKMYQVEFKTMNAKLLMDPKRQIFLDQNMLAVIDELMQALNFNSETVPQKSSLEEPDFYKTKIKLCILLHAFRIRAVTIDRVMSYLNAS

SEQ ID NO: 803 - protein, 197 aa, Homo sapiens
RNLPVATPDPGMFPCLHHSQNLLRAVSNMLQKARQTLEFYPCTSEEIDHEDITKDKTSTVEACLPLHLTKNESCLNSRETSFITNGSCLASRKTSFMMALCLSSIYEDLKMYQVEFKTMNAKLLMDPKRQIFLDQNMLAVIDELMQALNFNSETVPQKSSLEEPDFYKTKIKLCILLHAFRIRAVTIDRVMSYLNAS

SEQ ID NO: 804 - protein, 197 aa, Homo sapiens
RNLPVATPDPGMFPCLHHSQNLLRAVSNMLQKARQTLEFYPCTSEEIDHEDITKDKTSTVEACLPLEVTKNESCLNSRETSFITNGSCLASRKTSFMMALCLSSIYEDLKMYQVEFKTMNAKLLMDPKRQIFLDQNMLAVIDELMQALNFNSETVPQKSSLEEPDFYKTKIKLCILLHAFRIRAVTIDRVMSYLNAS

SEQ ID NO: 805 - protein, 197 aa, Homo sapiens
RNLPVATPDPGMFPCLHHSQNLLRAVSNMLQKARQTLEFYPCTSEEIDHEDITKDKTSTVEACLPLEITKNESCLNSRETSFITNGSCLASRKTSFMMALCLSSIYEDLKMYQVEFKTMNAKLLMDPKRQIFLDQNMLAVIDELMQALNFNSETVPQKSSLEEPDFYKTKIKLCILLHAFRIRAVTIDRVMSYLNAS

SEQ ID NO: 806 - protein, 197 aa, Homo sapiens
RNLPVATPDPGMFPCLHHSQNLLRAVSNMLQKARQTLEFYPCTSEEIDHEDITKDKTSTVEACLPLELTQNESCLNSRETSFITNGSCLASRKTSFMMALCLSSIYEDLKMYQVEFKTMNAKLLMDPKRQIFLDQNMLAVIDELMQALNFNSETVPQKSSLEEPDFYKTKIKLCILLHAFRIRAVTIDRVMSYLNAS

SEQ ID NO: 807 - protein, 197 aa, Homo sapiens
RNLPVATPDPGMFPCLHHSQNLLRAVSNMLQKARQTLEFYPCTSEEIDHEDITKDKTSTVEACLPLELTNNESCLNSRETSFITNGSCLASRKTSFMMALCLSSIYEDLKMYQVEFKTMNAKLLMDPKRQIFLDQNMLAVIDELMQALNFNSETVPQKSSLEEPDFYKTKIKLCILLHAFRIRAVTIDRVMSYLNAS

SEQ ID NO: 808 - protein, 197 aa, Homo sapiens
RNLPVATPDPGMFPCLHHSQNLLRAVSNMLQKARQTLEFYPCTSEEIDHEDITKDKTSTVEACLPLELTKNQSCLNSRETSFITNGSCLASRKTSFMMALCLSSIYEDLKMYQVEFKTMNAKLLMDPKRQIFLDQNMLAVIDELMQALNFNSETVPQKSSLEEPDFYKTKIKLCILLHAFRIRAVTIDRVMSYLNAS

SEQ ID NO: 809 - protein, 197 aa, Homo sapiens
RNLPVATPDPGMFPCLHHSQNLLRAVSNMLQKARQTLEFYPCTSEEIDHEDITKDKTSTVEACLPLELTKNNSCLNSRETSFITNGSCLASRKTSFMMALCLSSIYEDLKMYQVEFKTMNAKLLMDPKRQIFLDQNMLAVIDELMQALNFNSETVPQKSSLEEPDFYKTKIKLCILLHAFRIRAVTIDRVMSYLNAS

SEQ ID NO: 810 - protein, 197 aa, Homo sapiens
RNLPVATPDPGMFPCLHHSQNLLRAVSNMLQKARQTLEFYPCTSEEIDHEDITKDKTSTVEACLPLELTKNHSCLNSRETSFITNGSCLASRKTSFMMALCLSSIYEDLKMYQVEFKTMNAKLLMDPKRQIFLDQNMLAVIDELMQALNFNSETVPQKSSLEEPDFYKTKIKLCILLHAFRIRAVTIDRVMSYLNAS

SEQ ID NO: 811 - protein, 197 aa, Homo sapiens
RNLPVATPDPGMFPCLHHSQNLLRAVSNMLQKARQTLEFYPCTSEEIDHEDITKDKTSTVEACLPLELTKNESCVNSRETSFITNGSCLASRKTSFMMALCLSSIYEDLKMYQVEFKTMNAKLLMDPKRQIFLDQNMLAVIDELMQALNFNSETVPQKSSLEEPDFYKTKIKLCILLHAFRIRAVTIDRVMSYLNAS

SEQ ID NO: 812 - protein, 197 aa, Homo sapiens
RNLPVATPDPGMFPCLHHSQNLLRAVSNMLQKARQTLEFYPCTSEEIDHEDITKDKTSTVEACLPLELTKNESCINSRETSFITNGSCLASRKTSFMMALCLSSIYEDLKMYQVEFKTMNAKLLMDPKRQIFLDQNMLAVIDELMQALNFNSETVPQKSSLEEPDFYKTKIKLCILLHAFRIRAVTIDRVMSYLNAS

SEQ ID NO: 813 - protein, 197 aa, Homo sapiens
RNLPVATPDPGMFPCLHHSQNLLRAVSNMLQKARQTLEFYPCTSEEIDHEDITKDKTSTVEACLPLELTKNESCLNSHETSFITNGSCLASRKTSFMMALCLSSIYEDLKMYQVEFKTMNAKLLMDPKRQIFLDQNMLAVIDELMQALNFNSETVPQKSSLEEPDFYKTKIKLCILLHAFRIRAVTIDRVMSYLNAS

SEQ ID NO: 814 - protein, 197 aa, Homo sapiens
RNLPVATPDPGMFPCLHHSQNLLRAVSNMLQKARQTLEFYPCTSEEIDHEDITKDKTSTVEACLPLELTKNESCLNSQETSFITNGSCLASRKTSFMMALCLSSIYEDLKMYQVEFKTMNAKLLMDPKRQIFLDQNMLAVIDELMQALNFNSETVPQKSSLEEPDFYKTKIKLCILLHAFRIRAVTIDRVMSYLNAS

SEQ ID NO: 815 - protein, 197 aa, Homo sapiens
RNLPVATPDPGMFPCLHHSQNLLRAVSNMLQKARQTLEFYPCTSEEIDHEDITKDKTSTVEACLPLELTKNESCLNSRQTSFITNGSCLASRKTSFMMALCLSSIYEDLKMYQVEFKTMNAKLLMDPKRQIFLDQNMLAVIDELMQALNFNSETVPQKSSLEEPDFYKTKIKLCILLHAFRIRAVTIDRVMSYLNAS

SEQ ID NO: 816 - protein, 197 aa, Homo sapiens
RNLPVATPDPGMFPCLHHSQNLLRAVSNMLQKARQTLEFYPCTSEEIDHEDITKDKTSTVEACLPLELTKNESCLNSRNTSFITNGSCLASRKTSFMMALCLSSIYEDLKMYQVEFKTMNAKLLMDPKRQIFLDQNMLAVIDELMQALNFNSETVPQKSSLEEPDFYKTKIKLCILLHAFRIRAVTIDRVMSYLNAS

SEQ ID NO: 817 - protein, 197 aa, Homo sapiens
RNLPVATPDPGMFPCLHHSQNLLRAVSNMLQKARQTLEFYPCTSEEIDHEDITKDKTSTVEACLPLELTKNESCLNSRHTSFITNGSCLASRKTSFMMALCLSSIYEDLKMYQVEFKTMNAKLLMDPKRQIFLDQNMLAVIDELMQALNFNSETVPQKSSLEEPDFYKTKIKLCILLHAFRIRAVTIDRVMSYLNAS

SEQ ID NO: 818 - protein, 197 aa, Homo sapiens
RNLPVATPDPGMFPCLHHSQNLLRAVSNMLQKARQTLEFYPCTSEEIDHEDITKDKTSTVEACLPLELTKNESCLNSRETSIITNGSCLASRKTSFMMALCLSSIYEDLKMYQVEFKTMNAKLLMDPKRQIFLDQNMLAVIDELMQALNFNSETVPQKSSLEEPDFYKTKIKLCILLHAFRIRAVTIDRVMSYLNAS

SEQ ID NO: 819 - protein, 197 aa, Homo sapiens
RNLPVATPDPGMFPCLHHSQNLLRAVSNMLQKARQTLEFYPCTSEEIDHEDITKDKTSTVEACLPLELTKNESCLNSRETSVITNGSCLASRKTSFMMALCLSSIYEDLKMYQVEFKTMNAKLLMDPKRQIFLDQNMLAVIDELMQALNFNSETVPQKSSLEEPDFYKTKIKLCILLHAFRIRAVTIDRVMSYLNAS

SEQ ID NO: 820 - protein, 197 aa, Homo sapiens
RNLPVATPDPGMFPCLHHSQNLLRAVSNMLQKARQTLEFYPCTSEEIDHEDITKDKTSTVEACLPLELTKNESCLNSRETSFITNGSCVASRKTSFMMALCLSSIYEDLKMYQVEFKTMNAKLLMDPKRQIFLDQNMLAVIDELMQALNFNSETVPQKSSLEEPDFYKTKIKLCILLHAFRIRAVTIDRVMSYLNAS

SEQ ID NO: 821 - protein, 197 aa, Homo sapiens
RNLPVATPDPGMFPCLHHSQNLLRAVSNMLQKARQTLEFYPCTSEEIDHEDITKDKTSTVEACLPLELTKNESCLNSRETSFITNGSCIASRKTSFMMALCLSSIYEDLKMYQVEFKTMNAKLLMDPKRQIFLDQNMLAVIDELMQALNFNSETVPQKSSLEEPDFYKTKIKLCILLHAFRIRAVTIDRVMSYLNAS

SEQ ID NO: 822 - protein, 197 aa, Homo sapiens
RNLPVATPDPGMFPCLHHSQNLLRAVSNMLQKARQTLEFYPCTSEEIDHEDITKDKTSTVEACLPLELTKNESCLNSRETSFITNGSCLASHKTSFMMALCLSSIYEDLKMYQVEFKTMNAKLLMDPKRQIFLDQNMLAVIDELMQALNFNSETVPQKSSLEEPDFYKTKIKLCILLHAFRIRAVTIDRVMSYLNAS

SEQ ID NO: 823 - protein, 197 aa, Homo sapiens
RNLPVATPDPGMFPCLHHSQNLLRAVSNMLQKARQTLEFYPCTSEEIDHEDITKDKTSTVEACLPLELTKNESCLNSRETSFITNGSCLASQKTSFMMALCLSSIYEDLKMYQVEFKTMNAKLLMDPKRQIFLDQNMLAVIDELMQALNFNSETVPQKSSLEEPDFYKTKIKLCILLHAFRIRAVTIDRVMSYLNAS

SEQ ID NO: 824 - protein, 197 aa, Homo sapiens
RNLPVATPDPGMFPCLHHSQNLLRAVSNMLQKARQTLEFYPCTSEEIDHEDITKDKTSTVEACLPLELTKNESCLNSRETSFITNGSCLASRQTSFMMALCLSSIYEDLKMYQVEFKTMNAKLLMDPKRQIFLDQNMLAVIDELMQALNFNSETVPQKSSLEEPDFYKTKIKLCILLHAFRIRAVTIDRVMSYLNAS

SEQ ID NO: 825 - protein, 197 aa, Homo sapiens
RNLPVATPDPGMFPCLHHSQNLLRAVSNMLQKARQTLEFYPCTSEEIDHEDITKDKTSTVEACLPLELTKNESCLNSRETSFITNGSCLASRNTSFMMALCLSSIYEDLKMYQVEFKTMNAKLLMDPKRQIFLDQNMLAVIDELMQALNFNSETVPQKSSLEEPDFYKTKIKLCILLHAFRIRAVTIDRVMSYLNAS

SEQ ID NO: 826 - protein, 197 aa, Homo sapiens
RNLPVATPDPGMFPCLHHSQNLLRAVSNMLQKARQTLEFYPCTSEEIDHEDITKDKTSTVEACLPLELTKNESCLNSRETSFITNGSCLASRKTSFMMALCLSSIYQDLKMYQVEFKTMNAKLLMDPKRQIFLDQNMLAVIDELMQALNFNSETVPQKSSLEEPDFYKTKIKLCILLHAFRIRAVTIDRVMSYLNAS

SEQ ID NO: 827 - protein, 197 aa, Homo sapiens
RNLPVATPDPGMFPCLHHSQNLLRAVSNMLQKARQTLEFYPCTSEEIDHEDITKDKTSTVEACLPLELTKNESCLNSRETSFITNGSCLASRKTSFMMALCLSSIYNDLKMYQVEFKTMNAKLLMDPKRQIFLDQNMLAVIDELMQALNFNSETVPQKSSLEEPDFYKTKIKLCILLHAFRIRAVTIDRVMSYLNAS

SEQ ID NO: 828 - protein, 197 aa, Homo sapiens
RNLPVATPDPGMFPCLHHSQNLLRAVSNMLQKARQTLEFYPCTSEEIDHEDITKDKTSTVEACLPLELTKNESCLNSRETSFITNGSCLASRKTSFMMALCLSSIYHDLKMYQVEFKTMNAKLLMDPKRQIFLDQNMLAVIDELMQALNFNSETVPQKSSLEEPDFYKTKIKLCILLHAFRIRAVTIDRVMSYLNAS

SEQ ID NO: 829 - protein, 197 aa, Homo sapiens
RNLPVATPDPGMFPCLHHSQNLLRAVSNMLQKARQTLEFYPCTSEEIDHEDITKDKTSTVEACLPLELTKNESCLNSRETSFITNGSCLASRKTSFMMALCLSSIYEDLQMYQVEFKTMNAKLLMDPKRQIFLDQNMLAVIDELMQALNFNSETVPQKSSLEEPDFYKTKIKLCILLHAFRIRAVTIDRVMSYLNAS

SEQ ID NO: 830 - protein, 197 aa, Homo sapiens
RNLPVATPDPGMFPCLHHSQNLLRAVSNMLQKARQTLEFYPCTSEEIDHEDITKDKTSTVEACLPLELTKNESCLNSRETSFITNGSCLASRKTSFMMALCLSSIYEDLNMYQVEFKTMNAKLLMDPKRQIFLDQNMLAVIDELMQALNFNSETVPQKSSLEEPDFYKTKIKLCILLHAFRIRAVTIDRVMSYLNAS

SEQ ID NO: 831 - protein, 197 aa, Homo sapiens
RNLPVATPDPGMFPCLHHSQNLLRAVSNMLQKARQTLEFYPCTSEEIDHEDITKDKTSTVEACLPLELTKNESCLNSRETSFITNGSCLASRKTSFMMALCLSSIYEDLKVYQVEFKTMNAKLLMDPKRQIFLDQNMLAVIDELMQALNFNSETVPQKSSLEEPDFYKTKIKLCILLHAFRIRAVTIDRVMSYLNAS

SEQ ID NO: 832 - protein, 197 aa, Homo sapiens
RNLPVATPDPGMFPCLHHSQNLLRAVSNMLQKARQTLEFYPCTSEEIDHEDITKDKTSTVEACLPLELTKNESCLNSRETSFITNGSCLASRKTSFMMALCLSSIYEDLKIYQVEFKTMNAKLLMDPKRQIFLDQNMLAVIDELMQALNFNSETVPQKSSLEEPDFYKTKIKLCILLHAFRIRAVTIDRVMSYLNAS

SEQ ID NO: 833 - protein, 197 aa, Homo sapiens
RNLPVATPDPGMFPCLHHSQNLLRAVSNMLQKARQTLEFYPCTSEEIDHEDITKDKTSTVEACLPLELTKNESCLNSRETSFITNGSCLASRKTSFMMALCLSSIYEDLKMYQVQFKTMNAKLLMDPKRQIFLDQNMLAVIDELMQALNFNSETVPQKSSLEEPDFYKTKIKLCILLHAFRIRAVTIDRVMSYLNAS

SEQ ID NO: 834 - protein, 197 aa, Homo sapiens
RNLPVATPDPGMFPCLHHSQNLLRAVSNMLQKARQTLEFYPCTSEEIDHEDITKDKTSTVEACLPLELTKNESCLNSRETSFITNGSCLASRKTSFMMALCLSSIYEDLKMYQVNFKTMNAKLLMDPKRQIFLDQNMLAVIDELMQALNFNSETVPQKSSLEEPDFYKTKIKLCILLHAFRIRAVTIDRVMSYLNAS

SEQ ID NO: 835 - protein, 197 aa, Homo sapiens
RNLPVATPDPGMFPCLHHSQNLLRAVSNMLQKARQTLEFYPCTSEEIDHEDITKDKTSTVEACLPLELTKNESCLNSRETSFITNGSCLASRKTSFMMALCLSSIYEDLKMYQVHFKTMNAKLLMDPKRQIFLDQNMLAVIDELMQALNFNSETVPQKSSLEEPDFYKTKIKLCILLHAFRIRAVTIDRVMSYLNAS

SEQ ID NO: 836 - protein, 197 aa, Homo sapiens
RNLPVATPDPGMFPCLHHSQNLLRAVSNMLQKARQTLEFYPCTSEEIDHEDITKDKTSTVEACLPLELTKNESCLNSRETSFITNGSCLASRKTSFMMALCLSSIYEDLKMYQVEFQTMNAKLLMDPKRQIFLDQNMLAVIDELMQALNFNSETVPQKSSLEEPDFYKTKIKLCILLHAFRIRAVTIDRVMSYLNAS

SEQ ID NO: 837 - protein, 197 aa, Homo sapiens
RNLPVATPDPGMFPCLHHSQNLLRAVSNMLQKARQTLEFYPCTSEEIDHEDITKDKTSTVEACLPLELTKNESCLNSRETSFITNGSCLASRKTSFMMALCLSSIYEDLKMYQVEFNTMNAKLLMDPKRQIFLDQNMLAVIDELMQALNFNSETVPQKSSLEEPDFYKTKIKLCILLHAFRIRAVTIDRVMSYLNAS

SEQ ID NO: 838 - protein, 197 aa, Homo sapiens
RNLPVATPDPGMFPCLHHSQNLLRAVSNMLQKARQTLEFYPCTSEEIDHEDITKDKTSTVEACLPLELTKNESCLNSRETSFITNGSCLASRKTSFMMALCLSSIYEDLKMYQVEFKTMNAKLVMDPKRQIFLDQNMLAVIDELMQALNFNSETVPQKSSLEEPDFYKTKIKLCILLHAFRIRAVTIDRVMSYLNAS

SEQ ID NO: 839 - protein, 197 aa, Homo sapiens
RNLPVATPDPGMFPCLHHSQNLLRAVSNMLQKARQTLEFYPCTSEEIDHEDITKDKTSTVEACLPLELTKNESCLNSRETSFITNGSCLASRKTSFMMALCLSSIYEDLKMYQVEFKTMNAKLIMDPKRQIFLDQNMLAVIDELMQALNFNSETVPQKSSLEEPDFYKTKIKLCILLHAFRIRAVTIDRVMSYLNAS

SEQ ID NO: 840 - protein, 197 aa, Homo sapiens
RNLPVATPDPGMFPCLHHSQNLLRAVSNMLQKARQTLEFYPCTSEEIDHEDITKDKTSTVEACLPLELTKNESCLNSRETSFITNGSCLASRKTSFMMALCLSSIYEDLKMYQVEFKTMNAKLLVDPKRQIFLDQNMLAVIDELMQALNFNSETVPQKSSLEEPDFYKTKIKLCILLHAFRIRAVTIDRVMSYLNAS

SEQ ID NO: 841 - protein, 197 aa, Homo sapiens
RNLPVATPDPGMFPCLHHSQNLLRAVSNMLQKARQTLEFYPCTSEEIDHEDITKDKTSTVEACLPLELTKNESCLNSRETSFITNGSCLASRKTSFMMALCLSSIYEDLKMYQVEFKTMNAKLLIDPKRQIFLDQNMLAVIDELMQALNFNSETVPQKSSLEEPDFYKTKIKLCILLHAFRIRAVTIDRVMSYLNAS

SEQ ID NO: 842 - protein, 197 aa, Homo sapiens
RNLPVATPDPGMFPCLHHSQNLLRAVSNMLQKARQTLEFYPCTSEEIDHEDITKDKTSTVEACLPLELTKNESCLNSRETSFITNGSCLASRKTSFMMALCLSSIYEDLKMYQVEFKTMNAKLLMDSKRQIFLDQNMLAVIDELMQALNFNSETVPQKSSLEEPDFYKTKIKLCILLHAFRIRAVTIDRVMSYLNAS

SEQ ID NO: 843 - protein, 197 aa, Homo sapiens
RNLPVATPDPGMFPCLHHSQNLLRAVSNMLQKARQTLEFYPCTSEEIDHEDITKDKTSTVEACLPLELTKNESCLNSRETSFITNGSCLASRKTSFMMALCLSSIYEDLKMYQVEFKTMNAKLLMDAKRQIFLDQNMLAVIDELMQALNFNSETVPQKSSLEEPDFYKTKIKLCILLHAFRIRAVTIDRVMSYLNAS

SEQ ID NO: 844 - protein, 197 aa, Homo sapiens
RNLPVATPDPGMFPCLHHSQNLLRAVSNMLQKARQTLEFYPCTSEEIDHEDITKDKTSTVEACLPLELTKNESCLNSRETSFITNGSCLASRKTSFMMALCLSSIYEDLKMYQVEFKTMNAKLLMDPQRQIFLDQNMLAVIDELMQALNFNSETVPQKSSLEEPDFYKTKIKLCILLHAFRIRAVTIDRVMSYLNAS

SEQ ID NO: 845 - protein, 197 aa, Homo sapiens
RNLPVATPDPGMFPCLHHSQNLLRAVSNMLQKARQTLEFYPCTSEEIDHEDITKDKTSTVEACLPLELTKNESCLNSRETSFITNGSCLASRKTSFMMALCLSSIYEDLKMYQVEFKTMNAKLLMDPNRQIFLDQNMLAVIDELMQALNFNSETVPQKSSLEEPDFYKTKIKLCILLHAFRIRAVTIDRVMSYLNAS

SEQ ID NO: 846 - protein, 197 aa, Homo sapiens
RNLPVATPDPGMFPCLHHSQNLLRAVSNMLQKARQTLEFYPCTSEEIDHEDITKDKTSTVEACLPLELTKNESCLNSRETSFITNGSCLASRKTSFMMALCLSSIYEDLKMYQVEFKTMNAKLLMDPKHQIFLDQNMLAVIDELMQALNFNSETVPQKSSLEEPDFYKTKIKLCILLHAFRIRAVTIDRVMSYLNAS

SEQ ID NO: 847 - protein, 197 aa, Homo sapiens
RNLPVATPDPGMFPCLHHSQNLLRAVSNMLQKARQTLEFYPCTSEEIDHEDITKDKTSTVEACLPLELTKNESCLNSRETSFITNGSCLASRKTSFMMALCLSSIYEDLKMYQVEFKTMNAKLLMDPKQQIFLDQNMLAVIDELMQALNFNSETVPQKSSLEEPDFYKTKIKLCILLHAFRIRAVTIDRVMSYLNAS

SEQ ID NO: 848 - protein, 197 aa, Homo sapiens
RNLPVATPDPGMFPCLHHSQNLLRAVSNMLQKARQTLEFYPCTSEEIDHEDITKDKTSTVEACLPLELTKNESCLNSRETSFITNGSCLASRKTSFMMALCLSSIYEDLKMYQVEFKTMNAKLLMDPKRQIFLDQNMLAVIDELMQALNFNSETVPQKSSLEEPDFYKTKIKLCILLHAFRIRAVTIDHVMSYLNAS

SEQ ID NO: 849 - protein, 197 aa, Homo sapiens
RNLPVATPDPGMFPCLHHSQNLLRAVSNMLQKARQTLEFYPCTSEEIDHEDITKDKTSTVEACLPLELTKNESCLNSRETSFITNGSCLASRKTSFMMALCLSSIYEDLKMYQVEFKTMNAKLLMDPKRQIFLDQNMLAVIDELMQALNFNSETVPQKSSLEEPDFYKTKIKLCILLHAFRIRAVTIDQVMSYLNAS

SEQ ID NO: 850 - protein, 191 aa, Homo sapiens
FPTIPLSRLFDNAMLRAHRLHQLAFDTYQEFEEAYIPKEQKYSFLQNPQTSLCFSQSIPTPSNREETQQKSNLELLRISLLLIQSWLEPVQFLRSVFANSLVYGASDSNVYDLLKDLEEGIQTLMGRLEDGSPRTGQIFKQTYSKFDTNSHNDDALLKNYGLLYCFRKDMDKVETFLRIVQCRSVEGSCGF

SEQ ID NO: 851 - protein, 191 aa, Homo sapiens
FPTIPLSRLFDNAMLRAHRLHQLAFDTYQEFEEAYIPKEQKYSFLQNPQTSLCFSNSIPTPSNREETQQKSNLELLRISLLLIQSWLEPVQFLRSVFANSLVYGASDSNVYDLLKDLEEGIQTLMGRLEDGSPRTGQIFKQTYSKFDTNSHNDDALLKNYGLLYCFRKDMDKVETFLRIVQCRSVEGSCGF

SEQ ID NO: 852 - protein, 191 aa, Homo sapiens
FPTIPLSRLFDNAMLRAHRLHQLAFDTYQEFEEAYIPKEQKYSFLQNPQTSLCFSHSIPTPSNREETQQKSNLELLRISLLLIQSWLEPVQFLRSVFANSLVYGASDSNVYDLLKDLEEGIQTLMGRLEDGSPRTGQIFKQTYSKFDTNSHNDDALLKNYGLLYCFRKDMDKVETFLRIVQCRSVEGSCGF

SEQ ID NO: 853 - protein, 191 aa, Homo sapiens
FPTIPLSRLFDNAMLRAHRLHQLAFDTYQEFEEAYIPKEQKYSFLQNPQTSLCFSESISTPSNREETQQKSNLELLRISLLLIQSWLEPVQFLRSVFANSLVYGASDSNVYDLLKDLEEGIQTLMGRLEDGSPRTGQIFKQTYSKFDTNSHNDDALLKNYGLLYCFRKDMDKVETFLRIVQCRSVEGSCGF

SEQ ID NO: 854 - protein, 191 aa, Homo sapiens
FPTIPLSRLFDNAMLRAHRLHQLAFDTYQEFEEAYIPKEQKYSFLQNPQTSLCFSESIATPSNREETQQKSNLELLRISLLLIQSWLEPVQFLRSVFANSLVYGASDSNVYDLLKDLEEGIQTLMGRLEDGSPRTGQIFKQTYSKFDTNSHNDDALLKNYGLLYCFRKDMDKVETFLRIVQCRSVEGSCGF

SEQ ID NO: 855 - protein, 191 aa, Homo sapiens
FPTIPLSRLFDNAMLRAHRLHQLAFDTYQEFEEAYIPKEQKYSFLQNPQTSLCFSESIPTPSNHEETQQKSNLELLRISLLLIQSWLEPVQFLRSVFANSLVYGASDSNVYDLLKDLEEGIQTLMGRLEDGSPRTGQIFKQTYSKFDTNSHNDDALLKNYGLLYCFRKDMDKVETFLRIVQCRSVEGSCGF

SEQ ID NO: 856 - protein, 191 aa, Homo sapiens
FPTIPLSRLFDNAMLRAHRLHQLAFDTYQEFEEAYIPKEQKYSFLQNPQTSLCFSESIPTPSNQEETQQKSNLELLRISLLLIQSWLEPVQFLRSVFANSLVYGASDSNVYDLLKDLEEGIQTLMGRLEDGSPRTGQIFKQTYSKFDTNSHNDDALLKNYGLLYCFRKDMDKVETFLRIVQCRSVEGSCGF

SEQ ID NO: 857 - protein, 191 aa, Homo sapiens
FPTIPLSRLFDNAMLRAHRLHQLAFDTYQEFEEAYIPKEQKYSFLQNPQTSLCFSESIPTPSNRQETQQKSNLELLRISLLLIQSWLEPVQFLRSVFANSLVYGASDSNVYDLLKDLEEGIQTLMGRLEDGSPRTGQIFKQTYSKFDTNSHNDDALLKNYGLLYCFRKDMDKVETFLRIVQCRSVEGSCGF

SEQ ID NO: 858 - protein, 191 aa, Homo sapiens
FPTIPLSRLFDNAMLRAHRLHQLAFDTYQEFEEAYIPKEQKYSFLQNPQTSLCFSESIPTPSNRNETQQKSNLELLRISLLLIQSWLEPVQFLRSVFANSLVYGASDSNVYDLLKDLEEGIQTLMGRLEDGSPRTGQIFKQTYSKFDTNSHNDDALLKNYGLLYCFRKDMDKVETFLRIVQCRSVEGSCGF

SEQ ID NO: 859 - protein, 191 aa, Homo sapiens
FPTIPLSRLFDNAMLRAHRLHQLAFDTYQEFEEAYIPKEQKYSFLQNPQTSLCFSESIPTPSNRHETQQKSNLELLRISLLLIQSWLEPVQFLRSVFANSLVYGASDSNVYDLLKDLEEGIQTLMGRLEDGSPRTGQIFKQTYSKFDTNSHNDDALLKNYGLLYCFRKDMDKVETFLRIVQCRSVEGSCGF

SEQ ID NO: 860 - protein, 191 aa, Homo sapiens
FPTIPLSRLFDNAMLRAHRLHQLAFDTYQEFEEAYIPKEQKYSFLQNPQTSLCFSESIPTPSNREQTQQKSNLELLRISLLLIQSWLEPVQFLRSVFANSLVYGASDSNVYDLLKDLEEGIQTLMGRLEDGSPRTGQIFKQTYSKFDTNSHNDDALLKNYGLLYCFRKDMDKVETFLRIVQCRSVEGSCGF

SEQ ID NO: 861 - protein, 191 aa, Homo sapiens
FPTIPLSRLFDNAMLRAHRLHQLAFDTYQEFEEAYIPKEQKYSFLQNPQTSLCFSESIPTPSNRENTQQKSNLELLRISLLLIQSWLEPVQFLRSVFANSLVYGASDSNVYDLLKDLEEGIQTLMGRLEDGSPRTGQIFKQTYSKFDTNSHNDDALLKNYGLLYCFRKDMDKVETFLRIVQCRSVEGSCGF

SEQ ID NO: 862 - protein, 191 aa, Homo sapiens
FPTIPLSRLFDNAMLRAHRLHQLAFDTYQEFEEAYIPKEQKYSFLQNPQTSLCFSESIPTPSNREHTQQKSNLELLRISLLLIQSWLEPVQFLRSVFANSLVYGASDSNVYDLLKDLEEGIQTLMGRLEDGSPRTGQIFKQTYSKFDTNSHNDDALLKNYGLLYCFRKDMDKVETFLRIVQCRSVEGSCGF

SEQ ID NO: 863 - protein, 191 aa, Homo sapiens
FPTIPLSRLFDNAMLRAHRLHQLAFDTYQEFEEAYIPKEQKYSFLQNPQTSLCFSESIPTPSNREETQQKSNLELLRISLLLIQSWLQPVQFLRSVFANSLVYGASDSNVYDLLKDLEEGIQTLMGRLEDGSPRTGQIFKQTYSKFDTNSHNDDALLKNYGLLYCFRKDMDKVETFLRIVQCRSVEGSCGF

SEQ ID NO: 864 - protein, 191 aa, Homo sapiens
FPTIPLSRLFDNAMLRAHRLHQLAFDTYQEFEEAYIPKEQKYSFLQNPQTSLCFSESIPTPSNREETQQKSNLELLRISLLLIQSWLNPVQFLRSVFANSLVYGASDSNVYDLLKDLEEGIQTLMGRLEDGSPRTGQIFKQTYSKFDTNSHNDDALLKNYGLLYCFRKDMDKVETFLRIVQCRSVEGSCGF

SEQ ID NO: 865 - protein, 191 aa, Homo sapiens
FPTIPLSRLFDNAMLRAHRLHQLAFDTYQEFEEAYIPKEQKYSFLQNPQTSLCFSESIPTPSNREETQQKSNLELLRISLLLIQSWLHPVQFLRSVFANSLVYGASDSNVYDLLKDLEEGIQTLMGRLEDGSPRTGQIFKQTYSKFDTNSHNDDALLKNYGLLYCFRKDMDKVETFLRIVQCRSVEGSCGF

SEQ ID NO: 866 - protein, 191 aa, Homo sapiens
FPTIPLSRLFDNAMLRAHRLHQLAFDTYQEFEEAYIPKEQKYSFLQNPQTSLCFSESIPTPSNREETQQKSNLELLRISLLLIQSWLEPVQILRSVFANSLVYGASDSNVYDLLKDLEEGIQTLMGRLEDGSPRTGQIFKQTYSKFDTNSHNDDALLKNYGLLYCFRKDMDKVETFLRIVQCRSVEGSCGF

SEQ ID NO: 867 - protein, 191 aa, Homo sapiens
FPTIPLSRLFDNAMLRAHRLHQLAFDTYQEFEEAYIPKEQKYSFLQNPQTSLCFSESIPTPSNREETQQKSNLELLRISLLLIQSWLEPVQVLRSVFANSLVYGASDSNVYDLLKDLEEGIQTLMGRLEDGSPRTGQIFKQTYSKFDTNSHNDDALLKNYGLLYCFRKDMDKVETFLRIVQCRSVEGSCGF

SEQ ID NO: 868 - protein, 191 aa, Homo sapiens
FPTIPLSRLFDNAMLRAHRLHQLAFDTYQEFEEAYIPKEQKYSFLQNPQTSLCFSESIPTPSNREETQQKSNLELLRISLLLIQSWLEPVQFLHSVFANSLVYGASDSNVYDLLKDLEEGIQTLMGRLEDGSPRTGQIFKQTYSKFDTNSHNDDALLKNYGLLYCFRKDMDKVETFLRIVQCRSVEGSCGF

SEQ ID NO: 869 - protein, 191 aa, Homo sapiens
FPTIPLSRLFDNAMLRAHRLHQLAFDTYQEFEEAYIPKEQKYSFLQNPQTSLCFSESIPTPSNREETQQKSNLELLRISLLLIQSWLEPVQFLQSVFANSLVYGASDSNVYDLLKDLEEGIQTLMGRLEDGSPRTGQIFKQTYSKFDTNSHNDDALLKNYGLLYCFRKDMDKVETFLRIVQCRSVEGSCGF

SEQ ID NO: 870 - protein, 191 aa, Homo sapiens
FPTIPLSRLFDNAMLRAHRLHQLAFDTYQEFEEAYIPKEQKYSFLQNPQTSLCFSESIPTPSNREETQQKSNLELLRISLLLIQSWLEPVQFLRSVFANSVVYGASDSNVYDLLKDLEEGIQTLMGRLEDGSPRTGQIFKQTYSKFDTNSHNDDALLKNYGLLYCFRKDMDKVETFLRIVQCRSVEGSCGF

SEQ ID NO: 871 - protein, 191 aa, Homo sapiens
FPTIPLSRLFDNAMLRAHRLHQLAFDTYQEFEEAYIPKEQKYSFLQNPQTSLCFSESIPTPSNREETQQKSNLELLRISLLLIQSWLEPVQFLRSVFANSIVYGASDSNVYDLLKDLEEGIQTLMGRLEDGSPRTGQIFKQTYSKFDTNSHNDDALLKNYGLLYCFRKDMDKVETFLRIVQCRSVEGSCGF

SEQ ID NO: 872 - protein, 191 aa, Homo sapiens
FPTIPLSRLFDNAMLRAHRLHQLAFDTYQEFEEAYIPKEQKYSFLQNPQTSLCFSESIPTPSNREETQQKSNLELLRISLLLIQSWLEPVQFLRSVFANSLVYGASDSNVYDLLKDLEEGIQTLMGRLQDGSPRTGQIFKQTYSKFDTNSHNDDALLKNYGLLYCFRKDMDKVETFLRIVQCRSVEGSCGF

SEQ ID NO: 873 - protein, 191 aa, Homo sapiens
FPTIPLSRLFDNAMLRAHRLHQLAFDTYQEFEEAYIPKEQKYSFLQNPQTSLCFSESIPTPSNREETQQKSNLELLRISLLLIQSWLEPVQFLRSVFANSLVYGASDSNVYDLLKDLEEGIQTLMGRLNDGSPRTGQIFKQTYSKFDTNSHNDDALLKNYGLLYCFRKDMDKVETFLRIVQCRSVEGSCGF

SEQ ID NO: 874 - protein, 191 aa, Homo sapiens
FPTIPLSRLFDNAMLRAHRLHQLAFDTYQEFEEAYIPKEQKYSFLQNPQTSLCFSESIPTPSNREETQQKSNLELLRISLLLIQSWLEPVQFLRSVFANSLVYGASDSNVYDLLKDLEEGIQTLMGRLHDGSPRTGQIFKQTYSKFDTNSHNDDALLKNYGLLYCFRKDMDKVETFLRIVQCRSVEGSCGF

SEQ ID NO: 875 - protein, 191 aa, Homo sapiens
FPTIPLSRLFDNAMLRAHRLHQLAFDTYQEFEEAYIPKEQKYSFLQNPQTSLCFSESIPTPSNREETQQKSNLELLRISLLLIQSWLEPVQFLRSVFANSLVYGASDSNVYDLLKDLEEGIQTLMGRLEQGSPRTGQIFKQTYSKFDTNSHNDDALLKNYGLLYCFRKDMDKVETFLRIVQCRSVEGSCGF

SEQ ID NO: 876 - protein, 191 aa, Homo sapiens
FPTIPLSRLFDNAMLRAHRLHQLAFDTYQEFEEAYIPKEQKYSFLQNPQTSLCFSESIPTPSNREETQQKSNLELLRISLLLIQSWLEPVQFLRSVFANSLVYGASDSNVYDLLKDLEEGIQTLMGRLENGSPRTGQIFKQTYSKFDTNSHNDDALLKNYGLLYCFRKDMDKVETFLRIVQCRSVEGSCGF

SEQ ID NO: 877 - protein, 191 aa, Homo sapiens
FPTIPLSRLFDNAMLRAHRLHQLAFDTYQEFEEAYIPKEQKYSFLQNPQTSLCFSESIPTPSNREETQQKSNLELLRISLLLIQSWLEPVQFLRSVFANSLVYGASDSNVYDLLKDLEEGIQTLMGRLEDGSSRTGQIFKQTYSKFDTNSHNDDALLKNYGLLYCFRKDMDKVETFLRIVQCRSVEGSCGF

SEQ ID NO: 878 - protein, 191 aa, Homo sapiens
FPTIPLSRLFDNAMLRAHRLHQLAFDTYQEFEEAYIPKEQKYSFLQNPQTSLCFSESIPTPSNREETQQKSNLELLRISLLLIQSWLEPVQFLRSVFANSLVYGASDSNVYDLLKDLEEGIQTLMGRLEDGSARTGQIFKQTYSKFDTNSHNDDALLKNYGLLYCFRKDMDKVETFLRIVQCRSVEGSCGF

SEQ ID NO: 879 - protein, 191 aa, Homo sapiens
FPTIPLSRLFDNAMLRAHRLHQLAFDTYQEFEEAYIPKEQKYSFLQNPQTSLCFSESIPTPSNREETQQKSNLELLRISLLLIQSWLEPVQFLRSVFANSLVYGASDSNVYDLLKDLEEGIQTLMGRLEDGSPHTGQIFKQTYSKFDTNSHNDDALLKNYGLLYCFRKDMDKVETFLRIVQCRSVEGSCGF

SEQ ID NO: 880 - protein, 191 aa, Homo sapiens
FPTIPLSRLFDNAMLRAHRLHQLAFDTYQEFEEAYIPKEQKYSFLQNPQTSLCFSESIPTPSNREETQQKSNLELLRISLLLIQSWLEPVQFLRSVFANSLVYGASDSNVYDLLKDLEEGIQTLMGRLEDGSPQTGQIFKQTYSKFDTNSHNDDALLKNYGLLYCFRKDMDKVETFLRIVQCRSVEGSCGF

SEQ ID NO: 881 - protein, 191 aa, Homo sapiens
FPTIPLSRLFDNAMLRAHRLHQLAFDTYQEFEEAYIPKEQKYSFLQNPQTSLCFSESIPTPSNREETQQKSNLELLRISLLLIQSWLEPVQFLRSVFANSLVYGASDSNVYDLLKDLEEGIQTLMGRLEDGSPRTGQIFQQTYSKFDTNSHNDDALLKNYGLLYCFRKDMDKVETFLRIVQCRSVEGSCGF

SEQ ID NO: 882 - protein, 191 aa, Homo sapiens
FPTIPLSRLFDNAMLRAHRLHQLAFDTYQEFEEAYIPKEQKYSFLQNPQTSLCFSESIPTPSNREETQQKSNLELLRISLLLIQSWLEPVQFLRSVFANSLVYGASDSNVYDLLKDLEEGIQTLMGRLEDGSPRTGQIFNQTYSKFDTNSHNDDALLKNYGLLYCFRKDMDKVETFLRIVQCRSVEGSCGF

SEQ ID NO: 883 - protein, 191 aa, Homo sapiens
FPTIPLSRLFDNAMLRAHRLHQLAFDTYQEFEEAYIPKEQKYSFLQNPQTSLCFSESIPTPSNREETQQKSNLELLRISLLLIQSWLEPVQFLRSVFANSLVYGASDSNVYDLLKDLEEGIQTLMGRLEDGSPRTGQIFKQTHSKFDTNSHNDDALLKNYGLLYCFRKDMDKVETFLRIVQCRSVEGSCGF

SEQ ID NO: 884 - protein, 191 aa, Homo sapiens
FPTIPLSRLFDNAMLRAHRLHQLAFDTYQEFEEAYIPKEQKYSFLQNPQTSLCFSESIPTPSNREETQQKSNLELLRISLLLIQSWLEPVQFLRSVFANSLVYGASDSNVYDLLKDLEEGIQTLMGRLEDGSPRTGQIFKQTISKFDTNSHNDDALLKNYGLLYCFRKDMDKVETFLRIVQCRSVEGSCGF

SEQ ID NO: 885 - protein, 191 aa, Homo sapiens
FPTIPLSRLFDNAMLRAHRLHQLAFDTYQEFEEAYIPKEQKYSFLQNPQTSLCFSESIPTPSNREETQQKSNLELLRISLLLIQSWLEPVQFLRSVFANSLVYGASDSNVYDLLKDLEEGIQTLMGRLEDGSPRTGQIFKQTYSQFDTNSHNDDALLKNYGLLYCFRKDMDKVETFLRIVQCRSVEGSCGF

SEQ ID NO: 886 - protein, 191 aa, Homo sapiens
FPTIPLSRLFDNAMLRAHRLHQLAFDTYQEFEEAYIPKEQKYSFLQNPQTSLCFSESIPTPSNREETQQKSNLELLRISLLLIQSWLEPVQFLRSVFANSLVYGASDSNVYDLLKDLEEGIQTLMGRLEDGSPRTGQIFKQTYSNFDTNSHNDDALLKNYGLLYCFRKDMDKVETFLRIVQCRSVEGSCGF

SEQ ID NO: 887 - protein, 191 aa, Homo sapiens
FPTIPLSRLFDNAMLRAHRLHQLAFDTYQEFEEAYIPKEQKYSFLQNPQTSLCFSESIPTPSNREETQQKSNLELLRISLLLIQSWLEPVQFLRSVFANSLVYGASDSNVYDLLKDLEEGIQTLMGRLEDGSPRTGQIFKQTYSKIDTNSHNDDALLKNYGLLYCFRKDMDKVETFLRIVQCRSVEGSCGF

SEQ ID NO: 888 - protein, 191 aa, Homo sapiens
FPTIPLSRLFDNAMLRAHRLHQLAFDTYQEFEEAYIPKEQKYSFLQNPQTSLCFSESIPTPSNREETQQKSNLELLRISLLLIQSWLEPVQFLRSVFANSLVYGASDSNVYDLLKDLEEGIQTLMGRLEDGSPRTGQIFKQTYSKVDTNSHNDDALLKNYGLLYCFRKDMDKVETFLRIVQCRSVEGSCGF

SEQ ID NO: 889 - protein, 191 aa, Homo sapiens
FPTIPLSRLFDNAMLRAHRLHQLAFDTYQEFEEAYIPKEQKYSFLQNPQTSLCFSESIPTPSNREETQQKSNLELLRISLLLIQSWLEPVQFLRSVFANSLVYGASDSNVYDLLKDLEEGIQTLMGRLEDGSPRTGQIFKQTYSKFQTNSHNDDALLKNYGLLYCFRKDMDKVETFLRIVQCRSVEGSCGF

SEQ ID NO: 890 - protein, 191 aa, Homo sapiens
FPTIPLSRLFDNAMLRAHRLHQLAFDTYQEFEEAYIPKEQKYSFLQNPQTSLCFSESIPTPSNREETQQKSNLELLRISLLLIQSWLEPVQFLRSVFANSLVYGASDSNVYDLLKDLEEGIQTLMGRLEDGSPRTGQIFKQTYSKFNTNSHNDDALLKNYGLLYCFRKDMDKVETFLRIVQCRSVEGSCGF

SEQ ID NO: 891 - protein, 191 aa, Homo sapiens
FPTIPLSRLFDNAMLRAHRLHQLAFDTYQEFEEAYIPKEQKYSFLQNPQTSLCFSESIPTPSNREETQQKSNLELLRISLLLIQSWLEPVQFLRSVFANSLVYGASDSNVYDLLKDLEEGIQTLMGRLEDGSPRTGQIFKQTYSKFDTNSHNDDALLKNYGLLYCFRKDMDKVETFLRIVQCHSVEGSCGF

SEQ ID NO: 892 - protein, 191 aa, Homo sapiens
FPTIPLSRLFDNAMLRAHRLHQLAFDTYQEFEEAYIPKEQKYSFLQNPQTSLCFSESIPTPSNREETQQKSNLELLRISLLLIQSWLEPVQFLRSVFANSLVYGASDSNVYDLLKDLEEGIQTLMGRLEDGSPRTGQIFKQTYSKFDTNSHNDDALLKNYGLLYCFRKDMDKVETFLRIVQCQSVEGSCGF

SEQ ID NO: 893 - protein, 191 aa, Homo sapiens
FPTIPLSRLFDNAMLRAHRLHQLAFDTYQEFEEAYIPKEQKYSFLQNPQTSLCFSESIPTPSNREETQQKSNLELLRISLLLIQSWLEPVQFLRSVFANSLVYGASDSNVYDLLKDLEEGIQTLMGRLEDGSPRTGQIFKQTYSKFDTNSHNDDALLKNYGLLYCFRKDMDKVETFLRIVQCRSVQGSCGF

SEQ ID NO: 894 - protein, 191 aa, Homo sapiens
FPTIPLSRLFDNAMLRAHRLHQLAFDTYQEFEEAYIPKEQKYSFLQNPQTSLCFSESIPTPSNREETQQKSNLELLRISLLLIQSWLEPVQFLRSVFANSLVYGASDSNVYDLLKDLEEGIQTLMGRLEDGSPRTGQIFKQTYSKFDTNSHNDDALLKNYGLLYCFRKDMDKVETFLRIVQCRSVNGSCGF

SEQ ID NO: 895 - protein, 191 aa, Homo sapiens
FPTIPLSRLFDNAMLRAHRLHQLAFDTYQEFEEAYIPKEQKYSFLQNPQTSLCFSESIPTPSNREETQQKSNLELLRISLLLIQSWLEPVQFLRSVFANSLVYGASDSNVYDLLKDLEEGIQTLMGRLEDGSPRTGQIFKQTYSKFDTNSHNDDALLKNYGLLYCFRKDMDKVETFLRIVQCRSVHGSCGF

SEQ ID NO: 896 - protein, 183 aa, Homo sapiens
VPPGEDSKDVAAPHRQPLTSSERIDKQIRYILDGISALRKETCNKSNMCESSKEALAENNLNLSKMAEKDGCFQSGFNEETCLVKIITGLLEFEVYLEYLQNRFESSEEQARAVQMSTKVLIQFLQKKAKNLDAITTPDPTTNASLLTKLQAQNQWLQDMTTHLILRSFKEFLQSSLRALRQM

SEQ ID NO: 897 - protein, 183 aa, Homo sapiens
VPPGEDSKDVAAPHRQPLTSSERIDKQIRYILDGISALRKETCNKSNMCESSKEALAENNLNLAKMAEKDGCFQSGFNEETCLVKIITGLLEFEVYLEYLQNRFESSEEQARAVQMSTKVLIQFLQKKAKNLDAITTPDPTTNASLLTKLQAQNQWLQDMTTHLILRSFKEFLQSSLRALRQM

SEQ ID NO: 898 - protein, 183 aa, Homo sapiens
VPPGEDSKDVAAPHRQPLTSSERIDKQIRYILDGISALRKETCNKSNMCESSKEALAENNLNLPQMAEKDGCFQSGFNEETCLVKIITGLLEFEVYLEYLQNRFESSEEQARAVQMSTKVLIQFLQKKAKNLDAITTPDPTTNASLLTKLQAQNQWLQDMTTHLILRSFKEFLQSSLRALRQM

SEQ ID NO: 899 - protein, 183 aa, Homo sapiens
VPPGEDSKDVAAPHRQPLTSSERIDKQIRYILDGISALRKETCNKSNMCESSKEALAENNLNLPNMAEKDGCFQSGFNEETCLVKIITGLLEFEVYLEYLQNRFESSEEQARAVQMSTKVLIQFLQKKAKNLDAITTPDPTTNASLLTKLQAQNQWLQDMTTHLILRSFKEFLQSSLRALRQM

SEQ ID NO: 900 - protein, 183 aa, Homo sapiens
VPPGEDSKDVAAPHRQPLTSSERIDKQIRYILDGISALRKETCNKSNMCESSKEALAENNLNLPKVAEKDGCFQSGFNEETCLVKIITGLLEFEVYLEYLQNRFESSEEQARAVQMSTKVLIQFLQKKAKNLDAITTPDPTTNASLLTKLQAQNQWLQDMTTHLILRSFKEFLQSSLRALRQM

SEQ ID NO: 901 - protein, 183 aa, Homo sapiens
VPPGEDSKDVAAPHRQPLTSSERIDKQIRYILDGISALRKETCNKSNMCESSKEALAENNLNLPKIAEKDGCFQSGFNEETCLVKIITGLLEFEVYLEYLQNRFESSEEQARAVQMSTKVLIQFLQKKAKNLDAITTPDPTTNASLLTKLQAQNQWLQDMTTHLILRSFKEFLQSSLRALRQM

SEQ ID NO: 902 - protein, 183 aa, Homo sapiens
VPPGEDSKDVAAPHRQPLTSSERIDKQIRYILDGISALRKETCNKSNMCESSKEALAENNLNLPKMAQKDGCFQSGFNEETCLVKIITGLLEFEVYLEYLQNRFESSEEQARAVQMSTKVLIQFLQKKAKNLDAITTPDPTTNASLLTKLQAQNQWLQDMTTHLILRSFKEFLQSSLRALRQM

SEQ ID NO: 903 - protein, 183 aa, Homo sapiens
VPPGEDSKDVAAPHRQPLTSSERIDKQIRYILDGISALRKETCNKSNMCESSKEALAENNLNLPKMANKDGCFQSGFNEETCLVKIITGLLEFEVYLEYLQNRFESSEEQARAVQMSTKVLIQFLQKKAKNLDAITTPDPTTNASLLTKLQAQNQWLQDMTTHLILRSFKEFLQSSLRALRQM

SEQ ID NO: 904 - protein, 183 aa, Homo sapiens
VPPGEDSKDVAAPHRQPLTSSERIDKQIRYILDGISALRKETCNKSNMCESSKEALAENNLNLPKMAHKDGCFQSGFNEETCLVKIITGLLEFEVYLEYLQNRFESSEEQARAVQMSTKVLIQFLQKKAKNLDAITTPDPTTNASLLTKLQAQNQWLQDMTTHLILRSFKEFLQSSLRALRQM

SEQ ID NO: 905 - protein, 183 aa, Homo sapiens
VPPGEDSKDVAAPHRQPLTSSERIDKQIRYILDGISALRKETCNKSNMCESSKEALAENNLNLPKMAEQDGCFQSGFNEETCLVKIITGLLEFEVYLEYLQNRFESSEEQARAVQMSTKVLIQFLQKKAKNLDAITTPDPTTNASLLTKLQAQNQWLQDMTTHLILRSFKEFLQSSLRALRQM

SEQ ID NO: 906 - protein, 183 aa, Homo sapiens
VPPGEDSKDVAAPHRQPLTSSERIDKQIRYILDGISALRKETCNKSNMCESSKEALAENNLNLPKMAENDGCFQSGFNEETCLVKIITGLLEFEVYLEYLQNRFESSEEQARAVQMSTKVLIQFLQKKAKNLDAITTPDPTTNASLLTKLQAQNQWLQDMTTHLILRSFKEFLQSSLRALRQM

SEQ ID NO: 907 - protein, 183 aa, Homo sapiens
VPPGEDSKDVAAPHRQPLTSSERIDKQIRYILDGISALRKETCNKSNMCESSKEALAENNLNLPKMAEKDGCIQSGFNEETCLVKIITGLLEFEVYLEYLQNRFESSEEQARAVQMSTKVLIQFLQKKAKNLDAITTPDPTTNASLLTKLQAQNQWLQDMTTHLILRSFKEFLQSSLRALRQM

SEQ ID NO: 908 - protein, 183 aa, Homo sapiens
VPPGEDSKDVAAPHRQPLTSSERIDKQIRYILDGISALRKETCNKSNMCESSKEALAENNLNLPKMAEKDGCVQSGFNEETCLVKIITGLLEFEVYLEYLQNRFESSEEQARAVQMSTKVLIQFLQKKAKNLDAITTPDPTTNASLLTKLQAQNQWLQDMTTHLILRSFKEFLQSSLRALRQM

SEQ ID NO: 909 - protein, 183 aa, Homo sapiens
VPPGEDSKDVAAPHRQPLTSSERIDKQIRYILDGISALRKETCNKSNMCESSKEALAENNLNLPKMAEKDGCFQSGINEETCLVKIITGLLEFEVYLEYLQNRFESSEEQARAVQMSTKVLIQFLQKKAKNLDAITTPDPTTNASLLTKLQAQNQWLQDMTTHLILRSFKEFLQSSLRALRQM

SEQ ID NO: 910 - protein, 183 aa, Homo sapiens
VPPGEDSKDVAAPHRQPLTSSERIDKQIRYILDGISALRKETCNKSNMCESSKEALAENNLNLPKMAEKDGCFQSGVNEETCLVKIITGLLEFEVYLEYLQNRFESSEEQARAVQMSTKVLIQFLQKKAKNLDAITTPDPTTNASLLTKLQAQNQWLQDMTTHLILRSFKEFLQSSLRALRQM

SEQ ID NO: 911 - protein, 183 aa, Homo sapiens
VPPGEDSKDVAAPHRQPLTSSERIDKQIRYILDGISALRKETCNKSNMCESSKEALAENNLNLPKMAEKDGCFQSGFNEETCLVKIITGLLQFEVYLEYLQNRFESSEEQARAVQMSTKVLIQFLQKKAKNLDAITTPDPTTNASLLTKLQAQNQWLQDMTTHLILRSFKEFLQSSLRALRQM

SEQ ID NO: 912 - protein, 183 aa, Homo sapiens
VPPGEDSKDVAAPHRQPLTSSERIDKQIRYILDGISALRKETCNKSNMCESSKEALAENNLNLPKMAEKDGCFQSGFNEETCLVKIITGLLNFEVYLEYLQNRFESSEEQARAVQMSTKVLIQFLQKKAKNLDAITTPDPTTNASLLTKLQAQNQWLQDMTTHLILRSFKEFLQSSLRALRQM

SEQ ID NO: 913 - protein, 183 aa, Homo sapiens
VPPGEDSKDVAAPHRQPLTSSERIDKQIRYILDGISALRKETCNKSNMCESSKEALAENNLNLPKMAEKDGCFQSGFNEETCLVKIITGLLHFEVYLEYLQNRFESSEEQARAVQMSTKVLIQFLQKKAKNLDAITTPDPTTNASLLTKLQAQNQWLQDMTTHLILRSFKEFLQSSLRALRQM

SEQ ID NO: 914 - protein, 183 aa, Homo sapiens
VPPGEDSKDVAAPHRQPLTSSERIDKQIRYILDGISALRKETCNKSNMCESSKEALAENNLNLPKMAEKDGCFQSGFNEETCLVKIITGLLEFEVYLQYLQNRFESSEEQARAVQMSTKVLIQFLQKKAKNLDAITTPDPTTNASLLTKLQAQNQWLQDMTTHLILRSFKEFLQSSLRALRQM

SEQ ID NO: 915 - protein, 183 aa, Homo sapiens
VPPGEDSKDVAAPHRQPLTSSERIDKQIRYILDGISALRKETCNKSNMCESSKEALAENNLNLPKMAEKDGCFQSGFNEETCLVKIITGLLEFEVYLNYLQNRFESSEEQARAVQMSTKVLIQFLQKKAKNLDAITTPDPTTNASLLTKLQAQNQWLQDMTTHLILRSFKEFLQSSLRALRQM

SEQ ID NO: 916 - protein, 183 aa, Homo sapiens
VPPGEDSKDVAAPHRQPLTSSERIDKQIRYILDGISALRKETCNKSNMCESSKEALAENNLNLPKMAEKDGCFQSGFNEETCLVKIITGLLEFEVYLHYLQNRFESSEEQARAVQMSTKVLIQFLQKKAKNLDAITTPDPTTNASLLTKLQAQNQWLQDMTTHLILRSFKEFLQSSLRALRQM

SEQ ID NO: 917 - protein, 183 aa, Homo sapiens
VPPGEDSKDVAAPHRQPLTSSERIDKQIRYILDGISALRKETCNKSNMCESSKEALAENNLNLPKMAEKDGCFQSGFNEETCLVKIITGLLEFEVYLEYLQNHFESSEEQARAVQMSTKVLIQFLQKKAKNLDAITTPDPTTNASLLTKLQAQNQWLQDMTTHLILRSFKEFLQSSLRALRQM

SEQ ID NO: 918 - protein, 183 aa, Homo sapiens
VPPGEDSKDVAAPHRQPLTSSERIDKQIRYILDGISALRKETCNKSNMCESSKEALAENNLNLPKMAEKDGCFQSGFNEETCLVKIITGLLEFEVYLEYLQNQFESSEEQARAVQMSTKVLIQFLQKKAKNLDAITTPDPTTNASLLTKLQAQNQWLQDMTTHLILRSFKEFLQSSLRALRQM

SEQ ID NO: 919 - protein, 183 aa, Homo sapiens
VPPGEDSKDVAAPHRQPLTSSERIDKQIRYILDGISALRKETCNKSNMCESSKEALAENNLNLPKMAEKDGCFQSGFNEETCLVKIITGLLEFEVYLEYLQNRFQSSEEQARAVQMSTKVLIQFLQKKAKNLDAITTPDPTTNASLLTKLQAQNQWLQDMTTHLILRSFKEFLQSSLRALRQM

SEQ ID NO: 920 - protein, 183 aa, Homo sapiens
VPPGEDSKDVAAPHRQPLTSSERIDKQIRYILDGISALRKETCNKSNMCESSKEALAENNLNLPKMAEKDGCFQSGFNEETCLVKIITGLLEFEVYLEYLQNRFNSSEEQARAVQMSTKVLIQFLQKKAKNLDAITTPDPTTNASLLTKLQAQNQWLQDMTTHLILRSFKEFLQSSLRALRQM

SEQ ID NO: 921 - protein, 183 aa, Homo sapiens
VPPGEDSKDVAAPHRQPLTSSERIDKQIRYILDGISALRKETCNKSNMCESSKEALAENNLNLPKMAEKDGCFQSGFNEETCLVKIITGLLEFEVYLEYLQNRFHSSEEQARAVQMSTKVLIQFLQKKAKNLDAITTPDPTTNASLLTKLQAQNQWLQDMTTHLILRSFKEFLQSSLRALRQM

SEQ ID NO: 922 - protein, 183 aa, Homo sapiens
VPPGEDSKDVAAPHRQPLTSSERIDKQIRYILDGISALRKETCNKSNMCESSKEALAENNLNLPKMAEKDGCFQSGFNEETCLVKIITGLLEFEVYLEYLQNRFESSQEQARAVQMSTKVLIQFLQKKAKNLDAITTPDPTTNASLLTKLQAQNQWLQDMTTHLILRSFKEFLQSSLRALRQM

SEQ ID NO: 923 - protein, 183 aa, Homo sapiens
VPPGEDSKDVAAPHRQPLTSSERIDKQIRYILDGISALRKETCNKSNMCESSKEALAENNLNLPKMAEKDGCFQSGFNEETCLVKIITGLLEFEVYLEYLQNRFESSNEQARAVQMSTKVLIQFLQKKAKNLDAITTPDPTTNASLLTKLQAQNQWLQDMTTHLILRSFKEFLQSSLRALRQM

SEQ ID NO: 924 - protein, 183 aa, Homo sapiens
VPPGEDSKDVAAPHRQPLTSSERIDKQIRYILDGISALRKETCNKSNMCESSKEALAENNLNLPKMAEKDGCFQSGFNEETCLVKIITGLLEFEVYLEYLQNRFESSHEQARAVQMSTKVLIQFLQKKAKNLDAITTPDPTTNASLLTKLQAQNQWLQDMTTHLILRSFKEFLQSSLRALRQM

SEQ ID NO: 925 - protein, 183 aa, Homo sapiens
VPPGEDSKDVAAPHRQPLTSSERIDKQIRYILDGISALRKETCNKSNMCESSKEALAENNLNLPKMAEKDGCFQSGFNEETCLVKIITGLLEFEVYLEYLQNRFESSEEQARAVQMSTKVLIQFLQKKAKNLQAITTPDPTTNASLLTKLQAQNQWLQDMTTHLILRSFKEFLQSSLRALRQM

SEQ ID NO: 926 - protein, 183 aa, Homo sapiens
VPPGEDSKDVAAPHRQPLTSSERIDKQIRYILDGISALRKETCNKSNMCESSKEALAENNLNLPKMAEKDGCFQSGFNEETCLVKIITGLLEFEVYLEYLQNRFESSEEQARAVQMSTKVLIQFLQKKAKNLNAITTPDPTTNASLLTKLQAQNQWLQDMTTHLILRSFKEFLQSSLRALRQM

SEQ ID NO: 927 - protein, 183 aa, Homo sapiens
VPPGEDSKDVAAPHRQPLTSSERIDKQIRYILDGISALRKETCNKSNMCESSKEALAENNLNLPKMAEKDGCFQSGFNEETCLVKIITGLLEFEVYLEYLQNRFESSEEQARAVQMSTKVLIQFLQKKAKNLDAITTSDPTTNASLLTKLQAQNQWLQDMTTHLILRSFKEFLQSSLRALRQM

SEQ ID NO: 928 - protein, 183 aa, Homo sapiens
VPPGEDSKDVAAPHRQPLTSSERIDKQIRYILDGISALRKETCNKSNMCESSKEALAENNLNLPKMAEKDGCFQSGFNEETCLVKIITGLLEFEVYLEYLQNRFESSEEQARAVQMSTKVLIQFLQKKAKNLDAITTADPTTNASLLTKLQAQNQWLQDMTTHLILRSFKEFLQSSLRALRQM

SEQ ID NO: 929 - protein, 183 aa, Homo sapiens
VPPGEDSKDVAAPHRQPLTSSERIDKQIRYILDGISALRKETCNKSNMCESSKEALAENNLNLPKMAEKDGCFQSGFNEETCLVKIITGLLEFEVYLEYLQNRFESSEEQARAVQMSTKVLIQFLQKKAKNLDAITTPQPTTNASLLTKLQAQNQWLQDMTTHLILRSFKEFLQSSLRALRQM

SEQ ID NO: 930 - protein, 183 aa, Homo sapiens
VPPGEDSKDVAAPHRQPLTSSERIDKQIRYILDGISALRKETCNKSNMCESSKEALAENNLNLPKMAEKDGCFQSGFNEETCLVKIITGLLEFEVYLEYLQNRFESSEEQARAVQMSTKVLIQFLQKKAKNLDAITTPNPTTNASLLTKLQAQNQWLQDMTTHLILRSFKEFLQSSLRALRQM

SEQ ID NO: 931 - protein, 183 aa, Homo sapiens
VPPGEDSKDVAAPHRQPLTSSERIDKQIRYILDGISALRKETCNKSNMCESSKEALAENNLNLPKMAEKDGCFQSGFNEETCLVKIITGLLEFEVYLEYLQNRFESSEEQARAVQMSTKVLIQFLQKKAKNLDAITTPDSTTNASLLTKLQAQNQWLQDMTTHLILRSFKEFLQSSLRALRQM

SEQ ID NO: 932 - protein, 183 aa, Homo sapiens
VPPGEDSKDVAAPHRQPLTSSERIDKQIRYILDGISALRKETCNKSNMCESSKEALAENNLNLPKMAEKDGCFQSGFNEETCLVKIITGLLEFEVYLEYLQNRFESSEEQARAVQMSTKVLIQFLQKKAKNLDAITTPDATTNASLLTKLQAQNQWLQDMTTHLILRSFKEFLQSSLRALRQM

SEQ ID NO: 933 - protein, 183 aa, Homo sapiens
VPPGEDSKDVAAPHRQPLTSSERIDKQIRYILDGISALRKETCNKSNMCESSKEALAENNLNLPKMAEKDGCFQSGFNEETCLVKIITGLLEFEVYLEYLQNRFESSEEQARAVQMSTKVLIQFLQKKAKNLDAITTPDPTTNASLLTQLQAQNQWLQDMTTHLILRSFKEFLQSSLRALRQM

SEQ ID NO: 934 - protein, 183 aa, Homo sapiens
VPPGEDSKDVAAPHRQPLTSSERIDKQIRYILDGISALRKETCNKSNMCESSKEALAENNLNLPKMAEKDGCFQSGFNEETCLVKIITGLLEFEVYLEYLQNRFESSEEQARAVQMSTKVLIQFLQKKAKNLDAITTPDPTTNASLLTNLQAQNQWLQDMTTHLILRSFKEFLQSSLRALRQM

SEQ ID NO: 935 - protein, 183 aa, Homo sapiens
VPPGEDSKDVAAPHRQPLTSSERIDKQIRYILDGISALRKETCNKSNMCESSKEALAENNLNLPKMAEKDGCFQSGFNEETCLVKIITGLLEFEVYLEYLQNRFESSEEQARAVQMSTKVLIQFLQKKAKNLDAITTPDPTTNASLLTKLQAQNQSLQDMTTHLILRSFKEFLQSSLRALRQM

SEQ ID NO: 936 - protein, 183 aa, Homo sapiens
VPPGEDSKDVAAPHRQPLTSSERIDKQIRYILDGISALRKETCNKSNMCESSKEALAENNLNLPKMAEKDGCFQSGFNEETCLVKIITGLLEFEVYLEYLQNRFESSEEQARAVQMSTKVLIQFLQKKAKNLDAITTPDPTTNASLLTKLQAQNQHLQDMTTHLILRSFKEFLQSSLRALRQM

SEQ ID NO: 937 - protein, 183 aa, Homo sapiens
VPPGEDSKDVAAPHRQPLTSSERIDKQIRYILDGISALRKETCNKSNMCESSKEALAENNLNLPKMAEKDGCFQSGFNEETCLVKIITGLLEFEVYLEYLQNRFESSEEQARAVQMSTKVLIQFLQKKAKNLDAITTPDPTTNASLLTKLQAQNQWLQDMTTHLILRSFKEFLQSSLHALRQM

SEQ ID NO: 938 - protein, 183 aa, Homo sapiens
VPPGEDSKDVAAPHRQPLTSSERIDKQIRYILDGISALRKETCNKSNMCESSKEALAENNLNLPKMAEKDGCFQSGFNEETCLVKIITGLLEFEVYLEYLQNRFESSEEQARAVQMSTKVLIQFLQKKAKNLDAITTPDPTTNASLLTKLQAQNQWLQDMTTHLILRSFKEFLQSSLQALRQM

SEQ ID NO: 939 - protein, 183 aa, Homo sapiens
VPPGEDSKDVAAPHRQPLTSSERIDKQIRYILDGISALRKETCNKSNMCESSKEALAENNLNLPKMAEKDGCFQSGFNEETCLVKIITGLLEFEVYLEYLQNRFESSEEQARAVQMSTKVLIQFLQKKAKNLDAITTPDPTTNASLLTKLQAQNQWLQDMTTHLILRSFKEFLQSSLRALHQM

SEQ ID NO: 940 - protein, 166 aa, Homo sapiens
APPRLICDSRVLERYLLEAKEAENITTGCAEHCSLNENITVPQTKVNFYAWKRMEVGQQAVEVWQGLALLSEAVLRGQALLVNSSQPWEPLQLHVDKAVSGLRSLTTLLRALGAQKEAISPPDAASAAPLRTITADTFRKLFRVYSNFLRGKLKLYTGEACRTGDR

SEQ ID NO: 941 - protein, 166 aa, Homo sapiens
APPRLICDSRVLERYLLEAKEAENITTGCAEHCSLNENITVPNTKVNFYAWKRMEVGQQAVEVWQGLALLSEAVLRGQALLVNSSQPWEPLQLHVDKAVSGLRSLTTLLRALGAQKEAISPPDAASAAPLRTITADTFRKLFRVYSNFLRGKLKLYTGEACRTGDR

SEQ ID NO: 942 - protein, 166 aa, Homo sapiens
APPRLICDSRVLERYLLEAKEAENITTGCAEHCSLNENITVPDTQVNFYAWKRMEVGQQAVEVWQGLALLSEAVLRGQALLVNSSQPWEPLQLHVDKAVSGLRSLTTLLRALGAQKEAISPPDAASAAPLRTITADTFRKLFRVYSNFLRGKLKLYTGEACRTGDR

SEQ ID NO: 943 - protein, 166 aa, Homo sapiens
APPRLICDSRVLERYLLEAKEAENITTGCAEHCSLNENITVPDTNVNFYAWKRMEVGQQAVEVWQGLALLSEAVLRGQALLVNSSQPWEPLQLHVDKAVSGLRSLTTLLRALGAQKEAISPPDAASAAPLRTITADTFRKLFRVYSNFLRGKLKLYTGEACRTGDR

SEQ ID NO: 944 - protein, 166 aa, Homo sapiens
APPRLICDSRVLERYLLEAKEAENITTGCAEHCSLNENITVPDTKVNIYAWKRMEVGQQAVEVWQGLALLSEAVLRGQALLVNSSQPWEPLQLHVDKAVSGLRSLTTLLRALGAQKEAISPPDAASAAPLRTITADTFRKLFRVYSNFLRGKLKLYTGEACRTGDR

SEQ ID NO: 945 - protein, 166 aa, Homo sapiens
APPRLICDSRVLERYLLEAKEAENITTGCAEHCSLNENITVPDTKVNVYAWKRMEVGQQAVEVWQGLALLSEAVLRGQALLVNSSQPWEPLQLHVDKAVSGLRSLTTLLRALGAQKEAISPPDAASAAPLRTITADTFRKLFRVYSNFLRGKLKLYTGEACRTGDR

SEQ ID NO: 946 - protein, 166 aa, Homo sapiens
APPRLICDSRVLERYLLEAKEAENITTGCAEHCSLNENITVPDTKVNFHAWKRMEVGQQAVEVWQGLALLSEAVLRGQALLVNSSQPWEPLQLHVDKAVSGLRSLTTLLRALGAQKEAISPPDAASAAPLRTITADTFRKLFRVYSNFLRGKLKLYTGEACRTGDR

SEQ ID NO: 947 - protein, 166 aa, Homo sapiens
APPRLICDSRVLERYLLEAKEAENITTGCAEHCSLNENITVPDTKVNFIAWKRMEVGQQAVEVWQGLALLSEAVLRGQALLVNSSQPWEPLQLHVDKAVSGLRSLTTLLRALGAQKEAISPPDAASAAPLRTITADTFRKLFRVYSNFLRGKLKLYTGEACRTGDR

SEQ ID NO: 948 - protein, 166 aa, Homo sapiens
APPRLICDSRVLERYLLEAKEAENITTGCAEHCSLNENITVPDTKVNFYAWQRMEVGQQAVEVWQGLALLSEAVLRGQALLVNSSQPWEPLQLHVDKAVSGLRSLTTLLRALGAQKEAISPPDAASAAPLRTITADTFRKLFRVYSNFLRGKLKLYTGEACRTGDR

SEQ ID NO: 949 - protein, 166 aa, Homo sapiens
APPRLICDSRVLERYLLEAKEAENITTGCAEHCSLNENITVPDTKVNFYAWNRMEVGQQAVEVWQGLALLSEAVLRGQALLVNSSQPWEPLQLHVDKAVSGLRSLTTLLRALGAQKEAISPPDAASAAPLRTITADTFRKLFRVYSNFLRGKLKLYTGEACRTGDR

SEQ ID NO: 950 - protein, 166 aa, Homo sapiens
APPRLICDSRVLERYLLEAKEAENITTGCAEHCSLNENITVPDTKVNFYAWKHMEVGQQAVEVWQGLALLSEAVLRGQALLVNSSQPWEPLQLHVDKAVSGLRSLTTLLRALGAQKEAISPPDAASAAPLRTITADTFRKLFRVYSNFLRGKLKLYTGEACRTGDR

SEQ ID NO: 951 - protein, 166 aa, Homo sapiens
APPRLICDSRVLERYLLEAKEAENITTGCAEHCSLNENITVPDTKVNFYAWKQMEVGQQAVEVWQGLALLSEAVLRGQALLVNSSQPWEPLQLHVDKAVSGLRSLTTLLRALGAQKEAISPPDAASAAPLRTITADTFRKLFRVYSNFLRGKLKLYTGEACRTGDR

SEQ ID NO: 952 - protein, 166 aa, Homo sapiens
APPRLICDSRVLERYLLEAKEAENITTGCAEHCSLNENITVPDTKVNFYAWKRMQVGQQAVEVWQGLALLSEAVLRGQALLVNSSQPWEPLQLHVDKAVSGLRSLTTLLRALGAQKEAISPPDAASAAPLRTITADTFRKLFRVYSNFLRGKLKLYTGEACRTGDR

SEQ ID NO: 953 - protein, 166 aa, Homo sapiens
APPRLICDSRVLERYLLEAKEAENITTGCAEHCSLNENITVPDTKVNFYAWKRMNVGQQAVEVWQGLALLSEAVLRGQALLVNSSQPWEPLQLHVDKAVSGLRSLTTLLRALGAQKEAISPPDAASAAPLRTITADTFRKLFRVYSNFLRGKLKLYTGEACRTGDR

SEQ ID NO: 954 - protein, 166 aa, Homo sapiens
APPRLICDSRVLERYLLEAKEAENITTGCAEHCSLNENITVPDTKVNFYAWKRMHVGQQAVEVWQGLALLSEAVLRGQALLVNSSQPWEPLQLHVDKAVSGLRSLTTLLRALGAQKEAISPPDAASAAPLRTITADTFRKLFRVYSNFLRGKLKLYTGEACRTGDR

SEQ ID NO: 955 - protein, 166 aa, Homo sapiens
APPRLICDSRVLERYLLEAKEAENITTGCAEHCSLNENITVPDTKVNFYAWKRMEVGQQAVEVWQGLALLSQAVLRGQALLVNSSQPWEPLQLHVDKAVSGLRSLTTLLRALGAQKEAISPPDAASAAPLRTITADTFRKLFRVYSNFLRGKLKLYTGEACRTGDR

SEQ ID NO: 956 - protein, 166 aa, Homo sapiens
APPRLICDSRVLERYLLEAKEAENITTGCAEHCSLNENITVPDTKVNFYAWKRMEVGQQAVEVWQGLALLSNAVLRGQALLVNSSQPWEPLQLHVDKAVSGLRSLTTLLRALGAQKEAISPPDAASAAPLRTITADTFRKLFRVYSNFLRGKLKLYTGEACRTGDR

SEQ ID NO: 957 - protein, 166 aa, Homo sapiens
APPRLICDSRVLERYLLEAKEAENITTGCAEHCSLNENITVPDTKVNFYAWKRMEVGQQAVEVWQGLALLSHAVLRGQALLVNSSQPWEPLQLHVDKAVSGLRSLTTLLRALGAQKEAISPPDAASAAPLRTITADTFRKLFRVYSNFLRGKLKLYTGEACRTGDR

SEQ ID NO: 958 - protein, 166 aa, Homo sapiens
APPRLICDSRVLERYLLEAKEAENITTGCAEHCSLNENITVPDTKVNFYAWKRMEVGQQAVEVWQGLALLSEAVVRGQALLVNSSQPWEPLQLHVDKAVSGLRSLTTLLRALGAQKEAISPPDAASAAPLRTITADTFRKLFRVYSNFLRGKLKLYTGEACRTGDR

SEQ ID NO: 959 - protein, 166 aa, Homo sapiens
APPRLICDSRVLERYLLEAKEAENITTGCAEHCSLNENITVPDTKVNFYAWKRMEVGQQAVEVWQGLALLSEAVIRGQALLVNSSQPWEPLQLHVDKAVSGLRSLTTLLRALGAQKEAISPPDAASAAPLRTITADTFRKLFRVYSNFLRGKLKLYTGEACRTGDR

SEQ ID NO: 960 - protein, 166 aa, Homo sapiens
APPRLICDSRVLERYLLEAKEAENITTGCAEHCSLNENITVPDTKVNFYAWKRMEVGQQAVEVWQGLALLSEAVLHGQALLVNSSQPWEPLQLHVDKAVSGLRSLTTLLRALGAQKEAISPPDAASAAPLRTITADTFRKLFRVYSNFLRGKLKLYTGEACRTGDR

SEQ ID NO: 961 - protein, 166 aa, Homo sapiens
APPRLICDSRVLERYLLEAKEAENITTGCAEHCSLNENITVPDTKVNFYAWKRMEVGQQAVEVWQGLALLSEAVLQGQALLVNSSQPWEPLQLHVDKAVSGLRSLTTLLRALGAQKEAISPPDAASAAPLRTITADTFRKLFRVYSNFLRGKLKLYTGEACRTGDR

SEQ ID NO: 962 - protein, 166 aa, Homo sapiens
APPRLICDSRVLERYLLEAKEAENITTGCAEHCSLNENITVPDTKVNFYAWKRMEVGQQAVEVWQGLALLSEAVLRGQALLVNSSQPWEPLQLHVDKAVSGLRSLTTLLRALGAQKEAISPPQAASAAPLRTITADTFRKLFRVYSNFLRGKLKLYTGEACRTGDR

SEQ ID NO: 963 - protein, 166 aa, Homo sapiens
APPRLICDSRVLERYLLEAKEAENITTGCAEHCSLNENITVPDTKVNFYAWKRMEVGQQAVEVWQGLALLSEAVLRGQALLVNSSQPWEPLQLHVDKAVSGLRSLTTLLRALGAQKEAISPPNAASAAPLRTITADTFRKLFRVYSNFLRGKLKLYTGEACRTGDR

SEQ ID NO: 964 - protein, 166 aa, Homo sapiens
APPRLICDSRVLERYLLEAKEAENITTGCAEHCSLNENITVPDTKVNFYAWKRMEVGQQAVEVWQGLALLSEAVLRGQALLVNSSQPWEPLQLHVDKAVSGLRSLTTLLRALGAQKEAISPPDAASAASLRTITADTFRKLFRVYSNFLRGKLKLYTGEACRTGDR

SEQ ID NO: 965 - protein, 166 aa, Homo sapiens
APPRLICDSRVLERYLLEAKEAENITTGCAEHCSLNENITVPDTKVNFYAWKRMEVGQQAVEVWQGLALLSEAVLRGQALLVNSSQPWEPLQLHVDKAVSGLRSLTTLLRALGAQKEAISPPDAASAAALRTITADTFRKLFRVYSNFLRGKLKLYTGEACRTGDR

SEQ ID NO: 966 - protein, 166 aa, Homo sapiens
APPRLICDSRVLERYLLEAKEAENITTGCAEHCSLNENITVPDTKVNFYAWKRMEVGQQAVEVWQGLALLSEAVLRGQALLVNSSQPWEPLQLHVDKAVSGLRSLTTLLRALGAQKEAISPPDAASAAPVRTITADTFRKLFRVYSNFLRGKLKLYTGEACRTGDR

SEQ ID NO: 967 - protein, 166 aa, Homo sapiens
APPRLICDSRVLERYLLEAKEAENITTGCAEHCSLNENITVPDTKVNFYAWKRMEVGQQAVEVWQGLALLSEAVLRGQALLVNSSQPWEPLQLHVDKAVSGLRSLTTLLRALGAQKEAISPPDAASAAPIRTITADTFRKLFRVYSNFLRGKLKLYTGEACRTGDR

SEQ ID NO: 968 - protein, 166 aa, Homo sapiens
APPRLICDSRVLERYLLEAKEAENITTGCAEHCSLNENITVPDTKVNFYAWKRMEVGQQAVEVWQGLALLSEAVLRGQALLVNSSQPWEPLQLHVDKAVSGLRSLTTLLRALGAQKEAISPPDAASAAPLHTITADTFRKLFRVYSNFLRGKLKLYTGEACRTGDR

SEQ ID NO: 969 - protein, 166 aa, Homo sapiens
APPRLICDSRVLERYLLEAKEAENITTGCAEHCSLNENITVPDTKVNFYAWKRMEVGQQAVEVWQGLALLSEAVLRGQALLVNSSQPWEPLQLHVDKAVSGLRSLTTLLRALGAQKEAISPPDAASAAPLQTITADTFRKLFRVYSNFLRGKLKLYTGEACRTGDR

SEQ ID NO: 970 - protein, 166 aa, Homo sapiens
APPRLICDSRVLERYLLEAKEAENITTGCAEHCSLNENITVPDTKVNFYAWKRMEVGQQAVEVWQGLALLSEAVLRGQALLVNSSQPWEPLQLHVDKAVSGLRSLTTLLRALGAQKEAISPPDAASAAPLRTITADTFRKLFRVYSNFLRGKLKLYTGEACHTGDR

SEQ ID NO: 971 - protein, 166 aa, Homo sapiens
APPRLICDSRVLERYLLEAKEAENITTGCAEHCSLNENITVPDTKVNFYAWKRMEVGQQAVEVWQGLALLSEAVLRGQALLVNSSQPWEPLQLHVDKAVSGLRSLTTLLRALGAQKEAISPPDAASAAPLRTITADTFRKLFRVYSNFLRGKLKLYTGEACQTGDR

SEQ ID NO: 972 - protein, 166 aa, Homo sapiens
APPRLICDSRVLERYLLEAKEAENITTGCAEHCSLNENITVPDTKVNFYAWKRMEVGQQAVEVWQGLALLSEAVLRGQALLVNSSQPWEPLQLHVDKAVSGLRSLTTLLRALGAQKEAISPPDAASAAPLRTITADTFRKLFRVYSNFLRGKLKLYTGEACRTGQR

SEQ ID NO: 973 - protein, 166 aa, Homo sapiens
APPRLICDSRVLERYLLEAKEAENITTGCAEHCSLNENITVPDTKVNFYAWKRMEVGQQAVEVWQGLALLSEAVLRGQALLVNSSQPWEPLQLHVDKAVSGLRSLTTLLRALGAQKEAISPPDAASAAPLRTITADTFRKLFRVYSNFLRGKLKLYTGEACRTGNR

SEQ ID NO: 974 - protein, 166 aa, Homo sapiens
APPRLICDSRVLERYLLEAKEAENITTGCAEHCSLNENITVPDTKVNFYAWKRMEVGQQAVEVWQGLALLSEAVLRGQALLVNSSQPWEPLQLHVDKAVSGLRSLTTLLRALGAQKEAISSPDAASAAPLRTITADTFRKLFRVYSNFLRGKLKLYTGEACHTGDR

SEQ ID NO: 975 - protein, 166 aa, Homo sapiens
APPRLICDSRVLERYLLEAKEAENITTGCAEHCSLNENITVPDTKVNFYAWKRMEVGQQAVEVWQGLALLSEAVLRGQALLVNSSQPWEPLQLHVDKAVSGLRSLTTLLRALGAQKEAISAPDAASAAPLRTITADTFRKLFRVYSNFLRGKLKLYTGEACQTGDR

SEQ ID NO: 976 - protein, 166 aa, Homo sapiens
APPRLICDSRVLERYLLEAKEAENITTGCAEHCSLNENITVPDTKVNFYAWKRMEVGQQAVEVWQGLALLSEAVLRGQALLVNSSQPWEPLQLHVDKAVSGLRSLTTLLRALGAQKEAISPSDAASAAPLRTITADTFRKLFRVYSNFLRGKLKLYTGEACRTGQR

SEQ ID NO: 977 - protein, 166 aa, Homo sapiens
APPRLICDSRVLERYLLEAKEAENITTGCAEHCSLNENITVPDTKVNFYAWKRMEVGQQAVEVWQGLALLSEAVLRGQALLVNSSQPWEPLQLHVDKAVSGLRSLTTLLRALGAQKEAISPADAASAAPLRTITADTFRKLFRVYSNFLRGKLKLYTGEACRTGNR

SEQ ID NO: 978 - protein, 165 aa, Homo sapiens
CDLPQTHSLGSRRTLMLLAQMRRISLFSCLKDRHDFGFPQEEFGNQFQKAETIPVLHEMIQQIFNLFSTKDSSAAWDETLLDKFYTELYQQLNDLEACVIQGVGVTETPLVKEDSILAVRKYFQRITLYLKEKKYSPCAWEVVRAEIMRSFSLSTNLPESLRSKE

SEQ ID NO: 979 - protein, 165 aa, Homo sapiens
CDLPQTHSLGSRRTLMLLAQMRRISLFSCLKDRHDFGFPQHEFGDQFQKAETIPVLHEMIQQIFNLFSTKDSSAAWDETLLDKFYTELHQQLNDLEACVIQGVGVTETPLMKEDSILAVRKYFQRITLYLKEKKYSPCAWEVVRAEIMRSFSLSTNLQESLRSKE

SEQ ID NO: 980 - protein, 165 aa, Homo sapiens
CDLPQTHSLGSRRTLMLLAQMRRISLFSCLKDRHDFGFPQQEFGNQFQKAETIPVLHEMIQQIFNLFSTKDSSAAWDETLLDKFYTELYQQLNGLEACVIQGVGVTETPLMKEDSILAVRKYFQRITLYLKEKKYSPCAWEVVRAEIMRSFSLSTNLQESLRSKE

SEQ ID NO: 981 - protein, 165 aa, Homo sapiens
CDLPQTHSLGSRRTLMLLAQMRRISLVSCLKDRHDFGFPQEEFGNQFQKAETIPVLHQMIQQIFNLFSTKDSSAAWDETLLDKFYTELYQQLNDLEACVIQGVGVTETPLMKEDSILAVRKYFQRITLYLKEKKYSPCAWEVVRAEIMRSFSLSTNLQESLRSKE

SEQ ID NO: 982 - protein, 165 aa, Homo sapiens
CDLPQTHSLGSRRTLMLLAQMRRISLFSCLKDHHDFGFPQEEFGNQFQKAETIPVLHHMIQQIFNLFSTKDSSAAWDHTLLDKFYTELYQQLNDLEACVIQGVGVTETPVMKEDSILAVRKYFQRITLYLKEKKYSPCAWEVVRAEIMRSFSLSTNLQESLRSKE

SEQ ID NO: 983 - protein, 165 aa, Homo sapiens
CDLPQTHSLGSRRTLMLLAQMRRISLFSCLKDRHDFGFPQEEFGNQFQKAETIPVLHEMIQQIFNLFSTKDSSAAWDETLLDKFYTELYQQLNDLEACVIQGVGVTETALMKEDSILAVRQYFQRITLYLKEKKYSPCAWEVVRAEIMRSFSLSTNLQESLRSKE

SEQ ID NO: 984 - protein, 165 aa, Homo sapiens
CDLPQTHSLGSRRTLMLLAQMRRISLFSCLKDRHDFGFPQEEFGNQFQKAETIPVLHEMIQQIFNLFSTKDSSAAWDETLLDKFYTELYQQLNDLEACVIQRVGVTETALMKEDSILAVRQYFQRITLYLKEQKYSPCAWEVVRAEIMRSFSLSTNLQESLRSKE

SEQ ID NO: 985 - protein, 165 aa, Homo sapiens
CDLPQTHSLGSRRTLMLLAQMRRISLFSCLKDRHDFGFPQEEFGNQFQKAETIPVLHEMIQQIFNLFSTKDSSAAWDETLLDKFYTELYQQLNDLEACVIQGVGVTETPLMKEDSIVAVRKYFQRITLYLKEKKYSPCGWEVVRAEIMRSFSLSTNLQESLRSKE

SEQ ID NO: 986 - protein, 165 aa, Homo sapiens
CDLPQTHSLGSRRTLMLLAQMRRISLFSCLKDRHDFGFPQEEFGNQFQKAETIPVLHEMIQQIFNLFSTKDSSAAWDETLLDKFYTELYQQLNDLEACVIQGVGVTETPLVKEDSILAVRKYFQHITLYLKEKKYSPCAWEVVRAEIMRSFSLSTNLPESLRSKE

SEQ ID NO: 987 - protein, 165 aa, Homo sapiens
CDLPQTHSLGSRRTLMLLAQMRRISLFSCLKDRHDFGFPQEEFGNQFQKAETIPVLHEMIQQIFNLFSTKDSSAAWDETLLDKFYTELHQQLNDLEACVIQGVGVTETPLMKEDSILAVRKYFQRITLYLKEKKYSPCAWEVVRAEIMRSFSLSTNLQHSLRSKE

SEQ ID NO: 988 - protein, 165 aa, Homo sapiens
CDLPQTHSLGSRRTLMLLAQMRRISLFSCLKDRHDFGFPQEEFGNQFQKAETIPVLHEMIQQIFNLFSTKDSSAAWDETLLDKFYTELYQQLNDLEACVIAGVGVTETPLMKEDSILAVRKYFQRITLYLKEKKYSPCAWEVVRAEIMRSFSLSTNLQESLRSKE

SEQ ID NO: 989 - protein, 166 aa, Homo sapiens
MSYNLLGFLQRSSNFQCQKLLWQLNGRLEYCLKDRMNFDIPEEIKQLQQFQKEDAALTIYEMLQNIFAIFRQDSSSTGWNETIVENLLANVYHQINHLKTVLEEKLEKEDFTRGKLMSSLHLTRYYGRILHYLKAKEYSHCAWTIVRVEILRNFYFINRLTGYLRN

SEQ ID NO: 990 - protein, 166 aa, Homo sapiens
MSYNLLGFLQRSSNFQCQKLLWQLNGRLEYCLKDRMNFDIPEEIKQLQQFQKEDAALTIYEMLQNIFAIFRQDSSSTGWNETIVENLLANVYHQINHLKTVLEEKLEKEDFTRGKLMSSLHLSRYYGRILHYLKAKEYSHCAWTIVRVEILRNFYFINRLTGYLRN

SEQ ID NO: 991 - protein, 166 aa, Homo sapiens
MSYNLLGFLQRSSNFQCQKLLWQLNGRLEYCLKDRMNFDIPEEIKQLQQFQKEDAALTIYEMLQNIFAIFRQDSSSTGWNETIVENLLANVYHQINHLKTVLEEKLEKEDFTRGKLMSSLHLHRYYGRILHYLKAKEYSHCAWTIVRVEILRNFYFINRLTGYLRN

SEQ ID NO: 992 - protein, 166 aa, Homo sapiens
MSYNLLGFLQRSSNFQCQKLLWQLNGRLEYCLKDRMNFDIPEEIKQLQQFQKEDAALTIYEMLQNIFAIFRQDSSSTGWNETIVENLLANVYHQINHLKTVLEEKLEKEDFTRGKLMSSLHLKHYYGRILHYLKAKEYSHCAWTIVRVEILRNFYFINRLTGYLRN

SEQ ID NO: 993 - protein, 166 aa, Homo sapiens
MSYNLLGFLQRSSNFQCQKLLWQLNGRLEYCLKDRMNFDIPEEIKQLQQFQKEDAALTIYEMLQNIFAIFRQDSSSTGWNETIVENLLANVYHQINHLKTVLEEKLEKEDFTRGKLMSSLHLKQYYGRILHYLKAKEYSHCAWTIVRVEILRNFYFINRLTGYLRN

SEQ ID NO: 994 - protein, 166 aa, Homo sapiens
MSYNLLGFLQRSSNFQCQKLLWQLNGRLEYCLKDRMNFDIPEEIKQLQQFQKEDAALTIYEMLQNIFAIFRQDSSSTGWNETIVENLLANVYHQINHLKTVLEEKLEKEDFTRGKLMSSLHLKRYYGHILHYLKAKEYSHCAWTIVRVEILRNFYFINRLTGYLRN

SEQ ID NO: 995 - protein, 166 aa, Homo sapiens
MSYNLLGFLQRSSNFQCQKLLWQLNGRLEYCLKDRMNFDIPEEIKQLQQFQKEDAALTIYEMLQNIFAIFRQDSSSTGWNETIVENLLANVYHQINHLKTVLEEKLEKEDFTRGKLMSSLHLKRYYGQILHYLKAKEYSHCAWTIVRVEILRNFYFINRLTGYLRN

SEQ ID NO: 996 - protein, 166 aa, Homo sapiens
MSYNLLGFLQRSSNFQCQKLLWQLNGRLEYCLKDRMNFDIPEEIKQLQQFQKEDAALTIYEMLQNIFAIFRQDSSSTGWNETIVENLLANVYHQINHLKTVLEEKLEKEDFTRGKLMSSLHLKRYYGRIVHYLKAKEYSHCAWTIVRVEILRNFYFINRLTGYLRN

SEQ ID NO: 997 - protein, 166 aa, Homo sapiens
MSYNLLGFLQRSSNFQCQKLLWQLNGRLEYCLKDRMNFDIPEEIKQLQQFQKEDAALTIYEMLQNIFAIFRQDSSSTGWNETIVENLLANVYHQINHLKTVLEEKLEKEDFTRGKLMSSLHLKRYYGRIIHYLKAKEYSHCAWTIVRVEILRNFYFINRLTGYLRN

SEQ ID NO: 998 - protein, 166 aa, Homo sapiens
MSYNLLGFLQRSSNFQCQKLLWQLNGRLEYCLKDRMNFDIPEEIKQLQQFQKEDAALTIYEMLQNIFAIFRQDSSSTGWNETIVENLLANVYHQINHLKTVLEEKLEKEDFTRGKLMSSLHLKRYYGRITHYLKAKEYSHCAWTIVRVEILRNFYFINRLTGYLRN

SEQ ID NO: 999 - protein, 166 aa, Homo sapiens
MSYNLLGFLQRSSNFQCQKLLWQLNGRLEYCLKDRMNFDIPEEIKQLQQFQKEDAALTIYEMLQNIFAIFRQDSSSTGWNETIVENLLANVYHQINHLKTVLEEKLEKEDFTRGKLMSSLHLKRYYGRIQHYLKAKEYSHCAWTIVRVEILRNFYFINRLTGYLRN

SEQ ID NO: 1000 - protein, 166 aa, Homo sapiens
MSYNLLGFLQRSSNFQCQKLLWQLNGRLEYCLKDRMNFDIPEEIKQLQQFQKEDAALTIYEMLQNIFAIFRQDSSSTGWNETIVENLLANVYHQINHLKTVLEEKLEKEDFTRGKLMSSLHLKRYYGRIHHYLKAKEYSHCAWTIVRVEILRNFYFINRLTGYLRN

SEQ ID NO: 1001 - protein, 166 aa, Homo sapiens
MSYNLLGFLQRSSNFQCQKLLWQLNGRLEYCLKDRMNFDIPEEIKQLQQFQKEDAALTIYEMLQNIFAIFRQDSSSTGWNETIVENLLANVYHQINHLKTVLEEKLEKEDFTRGKLMSSLHLKRYYGRIAHYLKAKEYSHCAWTIVRVEILRNFYFINRLTGYLRN

SEQ ID NO: 1002 - protein, 166 aa, Homo sapiens
MSYNLLGFLQRSSNFQCQKLLWQLNGRLEYCLKDRMNFDIPEEIKQLQQFQKEDAALTIYEMLQNIFAIFRQDSSSTGWNETIVENLLANVYHQINHLKTVLEEKLEKEDFTRGKLMSSLHLKRYYGRILHYLQAKEYSHCAWTIVRVEILRNFYFINRLTGYLRN

SEQ ID NO: 1003 - protein, 166 aa, Homo sapiens
MSYNLLGFLQRSSNFQCQKLLWQLNGRLEYCLKDRMNFDIPEEIKQLQQFQKEDAALTIYEMLQNIFAIFRQDSSSTGWNETIVENLLANVYHQINHLKTVLEEKLEKEDFTRGKLMSSLHLKRYYGRILHYLTAKEYSHCAWTIVRVEILRNFYFINRLTGYLRN

SEQ ID NO: 1004 - protein, 166 aa, Homo sapiens
MSYNLLGFLQRSSNFQCQKLLWQLNGRLEYCLKDRMNFDIPEEIKQLQQFQKEDAALTIYEMLQNIFAIFRQDSSSTGWNETIVENLLANVYHQINHLKTVLEEKLEKEDFTRGKLMSSLHLKRYYGRILHYLSAKEYSHCAWTIVRVEILRNFYFINRLTGYLRN

SEQ ID NO: 1005 - protein, 166 aa, Homo sapiens
MSYNLLGFLQRSSNFQCQKLLWQLNGRLEYCLKDRMNFDIPEEIKQLQQFQKEDAALTIYEMLQNIFAIFRQDSSSTGWNETIVENLLANVYHQINHLKTVLEEKLEKEDFTRGKLMSSLHLKRYYGRILHYLHAKEYSHCAWTIVRVEILRNFYFINRLTGYLRN

SEQ ID NO: 1006 - protein, 166 aa, Homo sapiens
MSYNLLGFLQRSSNFQCQKLLWQLNGRLEYCLKDRMNFDIPEEIKQLQQFQKEDAALTIYEMLQNIFAIFRQDSSSTGWNETIVENLLANVYHQINHLKTVLEEKLEKEDFTRGKLMSSLHLKRYYGRILHYLKAQEYSHCAWTIVRVEILRNFYFINRLTGYLRN

SEQ ID NO: 1007 - protein, 166 aa, Homo sapiens
MSYNLLGFLQRSSNFQCQKLLWQLNGRLEYCLKDRMNFDIPEEIKQLQQFQKEDAALTIYEMLQNIFAIFRQDSSSTGWNETIVENLLANVYHQINHLKTVLEEKLEKEDFTRGKLMSSLHLKRYYGRILHYLKATEYSHCAWTIVRVEILRNFYFINRLTGYLRN

SEQ ID NO: 1008 - protein, 166 aa, Homo sapiens
MSYNLLGFLQRSSNFQCQKLLWQLNGRLEYCLKDRMNFDIPEEIKQLQQFQKEDAALTIYEMLQNIFAIFRQDSSSTGWNETIVENLLANVYHQINHLKTVLEEKLEKEDFTRGKLMSSLHLKRYYGRILHYLKASEYSHCAWTIVRVEILRNFYFINRLTGYLRN

SEQ ID NO: 1009 - protein, 166 aa, Homo sapiens
MSYNLLGFLQRSSNFQCQKLLWQLNGRLEYCLKDRMNFDIPEEIKQLQQFQKEDAALTIYEMLQNIFAIFRQDSSSTGWNETIVENLLANVYHQINHLKTVLEEKLEKEDFTRGKLMSSLHLKRYYGRILHYLKAHEYSHCAWTIVRVEILRNFYFINRLTGYLRN

SEQ ID NO: 1010 - protein, 166 aa, Homo sapiens
MSYNLLGFLQRSSNFQCQKLLWQLNGRLEYCLKDRMNFDIPEEIKQLQQFQKEDAALTIYEMLQNIFAIFRQDSSSTGWNETIVENLLANVYHQINHLKTVLEEKLEKEDFTRGKLMSSLHLKRYYGRILHYLKAKQYSHCAWTIVRVEILRNFYFINRLTGYLRN

SEQ ID NO: 1011 - protein, 166 aa, Homo sapiens
MSYNLLGFLQRSSNFQCQKLLWQLNGRLEYCLKDRMNFDIPEEIKQLQQFQKEDAALTIYEMLQNIFAIFRQDSSSTGWNETIVENLLANVYHQINHLKTVLEEKLEKEDFTRGKLMSSLHLKRYYGRILHYLKAKHYSHCAWTIVRVEILRNFYFINRLTGYLRN

SEQ ID NO: 1012 - protein, 166 aa, Homo sapiens
MSYNLLGFLQRSSNFQCQKLLWQLNGRLEYCLKDRMNFDIPEEIKQLQQFQKEDAALTIYEMLQNIFAIFRQDSSSTGWNETIVENLLANVYHQINHLKTVLEEKLEKEDFTRGKLMSSLHLKRYYGRILHYLKAKEYSHCAWTIVRVEILRNFYFINRLTGHLRN

SEQ ID NO: 1013 - protein, 166 aa, Homo sapiens
MSYNLLGFLQRSSNFQCQKLLWQLNGRLEYCLKDRMNFDIPEEIKQLQQFQKEDAALTIYEMLQNIFAIFRQDSSSTGWNETIVENLLANVYHQINHLKTVLEEKLEKEDFTRGKLMSSLHLKRYYGRILHYLKAKEYSHCAWTIVRVEILRNFYFINRLTGILRN

SEQ ID NO: 1014 - protein, 166 aa, Homo sapiens
MSYNLLGFLQRSSNFQCQKLLWQLNGRLEYCLKDRMNFDIPEEIKQLQQFQKEDAALTIYEMLQNIFAIFRQDSSSTGWNETIVENLLANVYHQINHLKTVLEEKLEKEDFTRGKLMSSLHLKRYYGRILHYLKAKEYSHCAWTIVRVEILRNFYFINRLTGYLHN

SEQ ID NO: 1015 - protein, 166 aa, Homo sapiens
MSYNLLGFLQRSSNFQCQKLLWQLNGRLEYCLKDRMNFDIPEEIKQLQQFQKEDAALTIYEMLQNIFAIFRQDSSSTGWNETIVENLLANVYHQINHLKTVLEEKLEKEDFTRGKLMSSLHLKRYYGRILHYLKAKEYSHCAWTIVRVEILRNFYFINRLTGYLQN

SEQ ID NO: 1016 - protein, 166 aa, Homo sapiens
VSYNLLGFLQRSSNFQCQKLLWQLNGRLEYCLKDRMNFDIPEEIKQLQQFQKEDAALTIYEMLQNIFAIFRQDSSSTGWNETIVENLLANVYHQINHLKTVLEEKLEKEDFTRGKLMSSLHLKRYYGRILHYLKAKEYSHCAWTIVRVEILRNFYFINRLTGYLRN

SEQ ID NO: 1017 - protein, 166 aa, Homo sapiens
ISYNLLGFLQRSSNFQCQKLLWQLNGRLEYCLKDRMNFDIPEEIKQLQQFQKEDAALTIYEMLQNIFAIFRQDSSSTGWNETIVENLLANVYHQINHLKTVLEEKLEKEDFTRGKLMSSLHLKRYYGRILHYLKAKEYSHCAWTIVRVEILRNFYFINRLTGYLRN

SEQ ID NO: 1018 - protein, 166 aa, Homo sapiens
TSYNLLGFLQRSSNFQCQKLLWQLNGRLEYCLKDRMNFDIPEEIKQLQQFQKEDAALTIYEMLQNIFAIFRQDSSSTGWNETIVENLLANVYHQINHLKTVLEEKLEKEDFTRGKLMSSLHLKRYYGRILHYLKAKEYSHCAWTIVRVEILRNFYFINRLTGYLRN

SEQ ID NO: 1019 - protein, 166 aa, Homo sapiens
ASYNLLGFLQRSSNFQCQKLLWQLNGRLEYCLKDRMNFDIPEEIKQLQQFQKEDAALTIYEMLQNIFAIFRQDSSSTGWNETIVENLLANVYHQINHLKTVLEEKLEKEDFTRGKLMSSLHLKRYYGRILHYLKAKEYSHCAWTIVRVEILRNFYFINRLTGYLRN

SEQ ID NO: 1020 - protein, 166 aa, Homo sapiens
MSYNVLGFLQRSSNFQCQKLLWQLNGRLEYCLKDRMNFDIPEEIKQLQQFQKEDAALTIYEMLQNIFAIFRQDSSSTGWNETIVENLLANVYHQINHLKTVLEEKLEKEDFTRGKLMSSLHLKRYYGRILHYLKAKEYSHCAWTIVRVEILRNFYFINRLTGYLRN

SEQ ID NO: 1021 - protein, 166 aa, Homo sapiens
MSYNILGFLQRSSNFQCQKLLWQLNGRLEYCLKDRMNFDIPEEIKQLQQFQKEDAALTIYEMLQNIFAIFRQDSSSTGWNETIVENLLANVYHQINHLKTVLEEKLEKEDFTRGKLMSSLHLKRYYGRILHYLKAKEYSHCAWTIVRVEILRNFYFINRLTGYLRN

SEQ ID NO: 1022 - protein, 166 aa, Homo sapiens
MSYNTLGFLQRSSNFQCQKLLWQLNGRLEYCLKDRMNFDIPEEIKQLQQFQKEDAALTIYEMLQNIFAIFRQDSSSTGWNETIVENLLANVYHQINHLKTVLEEKLEKEDFTRGKLMSSLHLKRYYGRILHYLKAKEYSHCAWTIVRVEILRNFYFINRLTGYLRN

SEQ ID NO: 1023 - protein, 166 aa, Homo sapiens
MSYNQLGFLQRSSNFQCQKLLWQLNGRLEYCLKDRMNFDIPEEIKQLQQFQKEDAALTIYEMLQNIFAIFRQDSSSTGWNETIVENLLANVYHQINHLKTVLEEKLEKEDFTRGKLMSSLHLKRYYGRILHYLKAKEYSHCAWTIVRVEILRNFYFINRLTGYLRN

SEQ ID NO: 1024 - protein, 166 aa, Homo sapiens
MSYNHLGFLQRSSNFQCQKLLWQLNGRLEYCLKDRMNFDIPEEIKQLQQFQKEDAALTIYEMLQNIFAIFRQDSSSTGWNETIVENLLANVYHQINHLKTVLEEKLEKEDFTRGKLMSSLHLKRYYGRILHYLKAKEYSHCAWTIVRVEILRNFYFINRLTGYLRN

SEQ ID NO: 1025 - protein, 166 aa, Homo sapiens
MSYNALGFLQRSSNFQCQKLLWQLNGRLEYCLKDRMNFDIPEEIKQLQQFQKEDAALTIYEMLQNIFAIFRQDSSSTGWNETIVENLLANVYHQINHLKTVLEEKLEKEDFTRGKLMSSLHLKRYYGRILHYLKAKEYSHCAWTIVRVEILRNFYFINRLTGYLRN

SEQ ID NO: 1026 - protein, 166 aa, Homo sapiens
MSYNLLGILQRSSNFQCQKLLWQLNGRLEYCLKDRMNFDIPEEIKQLQQFQKEDAALTIYEMLQNIFAIFRQDSSSTGWNETIVENLLANVYHQINHLKTVLEEKLEKEDFTRGKLMSSLHLKRYYGRILHYLKAKEYSHCAWTIVRVEILRNFYFINRLTGYLRN

SEQ ID NO: 1027 - protein, 166 aa, Homo sapiens
MSYNLLGVLQRSSNFQCQKLLWQLNGRLEYCLKDRMNFDIPEEIKQLQQFQKEDAALTIYEMLQNIFAIFRQDSSSTGWNETIVENLLANVYHQINHLKTVLEEKLEKEDFTRGKLMSSLHLKRYYGRILHYLKAKEYSHCAWTIVRVEILRNFYFINRLTGYLRN

SEQ ID NO: 1028 - protein, 166 aa, Homo sapiens
MSYNLLGFVQRSSNFQCQKLLWQLNGRLEYCLKDRMNFDIPEEIKQLQQFQKEDAALTIYEMLQNIFAIFRQDSSSTGWNETIVENLLANVYHQINHLKTVLEEKLEKEDFTRGKLMSSLHLKRYYGRILHYLKAKEYSHCAWTIVRVEILRNFYFINRLTGYLRN

SEQ ID NO: 1029 - protein, 166 aa, Homo sapiens
MSYNLLGFIQRSSNFQCQKLLWQLNGRLEYCLKDRMNFDIPEEIKQLQQFQKEDAALTIYEMLQNIFAIFRQDSSSTGWNETIVENLLANVYHQINHLKTVLEEKLEKEDFTRGKLMSSLHLKRYYGRILHYLKAKEYSHCAWTIVRVEILRNFYFINRLTGYLRN

SEQ ID NO: 1030 - protein, 166 aa, Homo sapiens
MSYNLLGFTQRSSNFQCQKLLWQLNGRLEYCLKDRMNFDIPEEIKQLQQFQKEDAALTIYEMLQNIFAIFRQDSSSTGWNETIVENLLANVYHQINHLKTVLEEKLEKEDFTRGKLMSSLHLKRYYGRILHYLKAKEYSHCAWTIVRVEILRNFYFINRLTGYLRN

SEQ ID NO: 1031 - protein, 166 aa, Homo sapiens
MSYNLLGFQQRSSNFQCQKLLWQLNGRLEYCLKDRMNFDIPEEIKQLQQFQKEDAALTIYEMLQNIFAIFRQDSSSTGWNETIVENLLANVYHQINHLKTVLEEKLEKEDFTRGKLMSSLHLKRYYGRILHYLKAKEYSHCAWTIVRVEILRNFYFINRLTGYLRN

SEQ ID NO: 1032 - protein, 166 aa, Homo sapiens
MSYNLLGFHQRSSNFQCQKLLWQLNGRLEYCLKDRMNFDIPEEIKQLQQFQKEDAALTIYEMLQNIFAIFRQDSSSTGWNETIVENLLANVYHQINHLKTVLEEKLEKEDFTRGKLMSSLHLKRYYGRILHYLKAKEYSHCAWTIVRVEILRNFYFINRLTGYLRN

SEQ ID NO: 1033 - protein, 166 aa, Homo sapiens
MSYNLLGFAQRSSNFQCQKLLWQLNGRLEYCLKDRMNFDIPEEIKQLQQFQKEDAALTIYEMLQNIFAIFRQDSSSTGWNETIVENLLANVYHQINHLKTVLEEKLEKEDFTRGKLMSSLHLKRYYGRILHYLKAKEYSHCAWTIVRVEILRNFYFINRLTGYLRN

SEQ ID NO: 1034 - protein, 166 aa, Homo sapiens
MSYNLLGFLQHSSNFQCQKLLWQLNGRLEYCLKDRMNFDIPEEIKQLQQFQKEDAALTIYEMLQNIFAIFRQDSSSTGWNETIVENLLANVYHQINHLKTVLEEKLEKEDFTRGKLMSSLHLKRYYGRILHYLKAKEYSHCAWTIVRVEILRNFYFINRLTGYLRN

SEQ ID NO: 1035 - protein, 166 aa, Homo sapiens
MSYNLLGFLQQSSNFQCQKLLWQLNGRLEYCLKDRMNFDIPEEIKQLQQFQKEDAALTIYEMLQNIFAIFRQDSSSTGWNETIVENLLANVYHQINHLKTVLEEKLEKEDFTRGKLMSSLHLKRYYGRILHYLKAKEYSHCAWTIVRVEILRNFYFINRLTGYLRN

SEQ ID NO: 1036 - protein, 166 aa, Homo sapiens
MSYNLLGFLQRSSNIQCQKLLWQLNGRLEYCLKDRMNFDIPEEIKQLQQFQKEDAALTIYEMLQNIFAIFRQDSSSTGWNETIVENLLANVYHQINHLKTVLEEKLEKEDFTRGKLMSSLHLKRYYGRILHYLKAKEYSHCAWTIVRVEILRNFYFINRLTGYLRN

SEQ ID NO: 1037 - protein, 166 aa, Homo sapiens
MSYNLLGFLQRSSNVQCQKLLWQLNGRLEYCLKDRMNFDIPEEIKQLQQFQKEDAALTIYEMLQNIFAIFRQDSSSTGWNETIVENLLANVYHQINHLKTVLEEKLEKEDFTRGKLMSSLHLKRYYGRILHYLKAKEYSHCAWTIVRVEILRNFYFINRLTGYLRN

SEQ ID NO: 1038 - protein, 166 aa, Homo sapiens
MSYNLLGFLQRSSNFQCQQLLWQLNGRLEYCLKDRMNFDIPEEIKQLQQFQKEDAALTIYEMLQNIFAIFRQDSSSTGWNETIVENLLANVYHQINHLKTVLEEKLEKEDFTRGKLMSSLHLKRYYGRILHYLKAKEYSHCAWTIVRVEILRNFYFINRLTGYLRN

SEQ ID NO: 1039 - protein, 166 aa, Homo sapiens
MSYNLLGFLQRSSNFQCQTLLWQLNGRLEYCLKDRMNFDIPEEIKQLQQFQKEDAALTIYEMLQNIFAIFRQDSSSTGWNETIVENLLANVYHQINHLKTVLEEKLEKEDFTRGKLMSSLHLKRYYGRILHYLKAKEYSHCAWTIVRVEILRNFYFINRLTGYLRN

SEQ ID NO: 1040 - protein, 166 aa, Homo sapiens
MSYNLLGFLQRSSNFQCQSLLWQLNGRLEYCLKDRMNFDIPEEIKQLQQFQKEDAALTIYEMLQNIFAIFRQDSSSTGWNETIVENLLANVYHQINHLKTVLEEKLEKEDFTRGKLMSSLHLKRYYGRILHYLKAKEYSHCAWTIVRVEILRNFYFINRLTGYLRN

SEQ ID NO: 1041 - protein, 166 aa, Homo sapiens
MSYNLLGFLQRSSNFQCQHLLWQLNGRLEYCLKDRMNFDIPEEIKQLQQFQKEDAALTIYEMLQNIFAIFRQDSSSTGWNETIVENLLANVYHQINHLKTVLEEKLEKEDFTRGKLMSSLHLKRYYGRILHYLKAKEYSHCAWTIVRVEILRNFYFINRLTGYLRN

SEQ ID NO: 1042 - protein, 166 aa, Homo sapiens
MSYNLLGFLQRSSNFQCQKLLSQLNGRLEYCLKDRMNFDIPEEIKQLQQFQKEDAALTIYEMLQNIFAIFRQDSSSTGWNETIVENLLANVYHQINHLKTVLEEKLEKEDFTRGKLMSSLHLKRYYGRILHYLKAKEYSHCAWTIVRVEILRNFYFINRLTGYLRN

SEQ ID NO: 1043 - protein, 165 aa, Homo sapiens
MSYNLLGFLQRSSNFQCQKLLHQLNGRLEYCLKDRMNFDIPEEIKQLQQFQKEDAALTIYEMLQNIFAIFRQDSSSTGWNETIVENLLANVYHQINHLKTVLEEKLEKEDFTRGKLMSSLHLKRYYGRILHYLKAKEYSHCAWTIVRVEILRNFYFINRLTGYLR

SEQ ID NO: 1044 - protein, 166 aa, Homo sapiens
MSYNLLGFLQRSSNFQCQKLLWQLHGRLEYCLKDRMNFDIPEEIKQLQQFQKEDAALTIYEMLQNIFAIFRQDSSSTGWNETIVENLLANVYHQINHLKTVLEEKLEKEDFTRGKLMSSLHLKRYYGRILHYLKAKEYSHCAWTIVRVEILRNFYFINRLTGYLRN

SEQ ID NO: 1045 - protein, 166 aa, Homo sapiens
MSYNLLGFLQRSSNFQCQKLLWQLSGRLEYCLKDRMNFDIPEEIKQLQQFQKEDAALTIYEMLQNIFAIFRQDSSSTGWNETIVENLLANVYHQINHLKTVLEEKLEKEDFTRGKLMSSLHLKRYYGRILHYLKAKEYSHCAWTIVRVEILRNFYFINRLTGYLRN

SEQ ID NO: 1046 - protein, 166 aa, Homo sapiens
MSYNLLGFLQRSSNFQCQKLLWQLQGRLEYCLKDRMNFDIPEEIKQLQQFQKEDAALTIYEMLQNIFAIFRQDSSSTGWNETIVENLLANVYHQINHLKTVLEEKLEKEDFTRGKLMSSLHLKRYYGRILHYLKAKEYSHCAWTIVRVEILRNFYFINRLTGYLRN

SEQ ID NO: 1047 - protein, 166 aa, Homo sapiens
MSYNLLGFLQRSSNFQCQKLLWQLNGHLEYCLKDRMNFDIPEEIKQLQQFQKEDAALTIYEMLQNIFAIFRQDSSSTGWNETIVENLLANVYHQINHLKTVLEEKLEKEDFTRGKLMSSLHLKRYYGRILHYLKAKEYSHCAWTIVRVEILRNFYFINRLTGYLRN

SEQ ID NO: 1048 - protein, 166 aa, Homo sapiens
MSYNLLGFLQRSSNFQCQKLLWQLNGQLEYCLKDRMNFDIPEEIKQLQQFQKEDAALTIYEMLQNIFAIFRQDSSSTGWNETIVENLLANVYHQINHLKTVLEEKLEKEDFTRGKLMSSLHLKRYYGRILHYLKAKEYSHCAWTIVRVEILRNFYFINRLTGYLRN

SEQ ID NO: 1049 - protein, 166 aa, Homo sapiens
MSYNLLGFLQRSSNFQCQKLLWQLNGRVEYCLKDRMNFDIPEEIKQLQQFQKEDAALTIYEMLQNIFAIFRQDSSSTGWNETIVENLLANVYHQINHLKTVLEEKLEKEDFTRGKLMSSLHLKRYYGRILHYLKAKEYSHCAWTIVRVEILRNFYFINRLTGYLRN

SEQ ID NO: 1050 - protein, 166 aa, Homo sapiens
MSYNLLGFLQRSSNFQCQKLLWQLNGRIEYCLKDRMNFDIPEEIKQLQQFQKEDAALTIYEMLQNIFAIFRQDSSSTGWNETIVENLLANVYHQINHLKTVLEEKLEKEDFTRGKLMSSLHLKRYYGRILHYLKAKEYSHCAWTIVRVEILRNFYFINRLTGYLRN

SEQ ID NO: 1051 - protein, 166 aa, Homo sapiens
MSYNLLGFLQRSSNFQCQKLLWQLNGRTEYCLKDRMNFDIPEEIKQLQQFQKEDAALTIYEMLQNIFAIFRQDSSSTGWNETIVENLLANVYHQINHLKTVLEEKLEKEDFTRGKLMSSLHLKRYYGRILHYLKAKEYSHCAWTIVRVEILRNFYFINRLTGYLRN

SEQ ID NO: 1052 - protein, 166 aa, Homo sapiens
MSYNLLGFLQRSSNFQCQKLLWQLNGRQEYCLKDRMNFDIPEEIKQLQQFQKEDAALTIYEMLQNIFAIFRQDSSSTGWNETIVENLLANVYHQINHLKTVLEEKLEKEDFTRGKLMSSLHLKRYYGRILHYLKAKEYSHCAWTIVRVEILRNFYFINRLTGYLRN

SEQ ID NO: 1053 - protein, 166 aa, Homo sapiens
MSYNLLGFLQRSSNFQCQKLLWQLNGRHEYCLKDRMNFDIPEEIKQLQQFQKEDAALTIYEMLQNIFAIFRQDSSSTGWNETIVENLLANVYHQINHLKTVLEEKLEKEDFTRGKLMSSLHLKRYYGRILHYLKAKEYSHCAWTIVRVEILRNFYFINRLTGYLRN

SEQ ID NO: 1054 - protein, 166 aa, Homo sapiens
MSYNLLGFLQRSSNFQCQKLLWQLNGRAEYCLKDRMNFDIPEEIKQLQQFQKEDAALTIYEMLQNIFAIFRQDSSSTGWNETIVENLLANVYHQINHLKTVLEEKLEKEDFTRGKLMSSLHLKRYYGRILHYLKAKEYSHCAWTIVRVEILRNFYFINRLTGYLRN

SEQ ID NO: 1055 - protein, 166 aa, Homo sapiens
MSYNLLGFLQRSSNFQCQKLLWQLNGRLQYCLKDRMNFDIPEEIKQLQQFQKEDAALTIYEMLQNIFAIFRQDSSSTGWNETIVENLLANVYHQINHLKTVLEEKLEKEDFTRGKLMSSLHLKRYYGRILHYLKAKEYSHCAWTIVRVEILRNFYFINRLTGYLRN

SEQ ID NO: 1056 - protein, 166 aa, Homo sapiens
MSYNLLGFLQRSSNFQCQKLLWQLNGRLHYCLKDRMNFDIPEEIKQLQQFQKEDAALTIYEMLQNIFAIFRQDSSSTGWNETIVENLLANVYHQINHLKTVLEEKLEKEDFTRGKLMSSLHLKRYYGRILHYLKAKEYSHCAWTIVRVEILRNFYFINRLTGYLRN

SEQ ID NO: 1057 - protein, 166 aa, Homo sapiens
MSYNLLGFLQRSSNFQCQKLLWQLNGRLEHCLKDRMNFDIPEEIKQLQQFQKEDAALTIYEMLQNIFAIFRQDSSSTGWNETIVENLLANVYHQINHLKTVLEEKLEKEDFTRGKLMSSLHLKRYYGRILHYLKAKEYSHCAWTIVRVEILRNFYFINRLTGYLRN

SEQ ID NO: 1058 - protein, 166 aa, Homo sapiens
MSYNLLGFLQRSSNFQCQKLLWQLNGRLEICLKDRMNFDIPEEIKQLQQFQKEDAALTIYEMLQNIFAIFRQDSSSTGWNETIVENLLANVYHQINHLKTVLEEKLEKEDFTRGKLMSSLHLKRYYGRILHYLKAKEYSHCAWTIVRVEILRNFYFINRLTGYLRN

SEQ ID NO: 1059 - protein, 166 aa, Homo sapiens
MSYNLLGFLQRSSNFQCQKLLWQLNGRLEYCVKDRMNFDIPEEIKQLQQFQKEDAALTIYEMLQNIFAIFRQDSSSTGWNETIVENLLANVYHQINHLKTVLEEKLEKEDFTRGKLMSSLHLKRYYGRILHYLKAKEYSHCAWTIVRVEILRNFYFINRLTGYLRN

SEQ ID NO: 1060 - protein, 166 aa, Homo sapiens
MSYNLLGFLQRSSNFQCQKLLWQLNGRLEYCIKDRMNFDIPEEIKQLQQFQKEDAALTIYEMLQNIFAIFRQDSSSTGWNETIVENLLANVYHQINHLKTVLEEKLEKEDFTRGKLMSSLHLKRYYGRILHYLKAKEYSHCAWTIVRVEILRNFYFINRLTGYLRN

SEQ ID NO: 1061 - protein, 166 aa, Homo sapiens
MSYNLLGFLQRSSNFQCQKLLWQLNGRLEYCTKDRMNFDIPEEIKQLQQFQKEDAALTIYEMLQNIFAIFRQDSSSTGWNETIVENLLANVYHQINHLKTVLEEKLEKEDFTRGKLMSSLHLKRYYGRILHYLKAKEYSHCAWTIVRVEILRNFYFINRLTGYLRN

SEQ ID NO: 1062 - protein, 166 aa, Homo sapiens
MSYNLLGFLQRSSNFQCQKLLWQLNGRLEYCQKDRMNFDIPEEIKQLQQFQKEDAALTIYEMLQNIFAIFRQDSSSTGWNETIVENLLANVYHQINHLKTVLEEKLEKEDFTRGKLMSSLHLKRYYGRILHYLKAKEYSHCAWTIVRVEILRNFYFINRLTGYLRN

SEQ ID NO: 1063 - protein, 166 aa, Homo sapiens
MSYNLLGFLQRSSNFQCQKLLWQLNGRLEYCHKDRMNFDIPEEIKQLQQFQKEDAALTIYEMLQNIFAIFRQDSSSTGWNETIVENLLANVYHQINHLKTVLEEKLEKEDFTRGKLMSSLHLKRYYGRILHYLKAKEYSHCAWTIVRVEILRNFYFINRLTGYLRN

SEQ ID NO: 1064 - protein, 166 aa, Homo sapiens
MSYNLLGFLQRSSNFQCQKLLWQLNGRLEYCAKDRMNFDIPEEIKQLQQFQKEDAALTIYEMLQNIFAIFRQDSSSTGWNETIVENLLANVYHQINHLKTVLEEKLEKEDFTRGKLMSSLHLKRYYGRILHYLKAKEYSHCAWTIVRVEILRNFYFINRLTGYLRN

SEQ ID NO: 1065 - protein, 166 aa, Homo sapiens
QSYNLLGFLQRSSNFQCQKLLWQLNGRLEYCLKDRMNFDIPEEIKQLQQFQKEDAALTIYEMLQNIFAIFRQDSSSTGWNETIVENLLANVYHQINHLKTVLEEKLEKEDFTRGKLMSSLHLKRYYGRILHYLKAKEYSHCAWTIVRVEILRNFYFINRLTGYLRN

SEQ ID NO: 1066 - protein, 166 aa, Homo sapiens
MSYNLLGFLQRSSNFQCQKLLWQLNGRLEYCLQDRMNFDIPEEIKQLQQFQKEDAALTIYEMLQNIFAIFRQDSSSTGWNETIVENLLANVYHQINHLKTVLEEKLEKEDFTRGKLMSSLHLKRYYGRILHYLKAKEYSHCAWTIVRVEILRNFYFINRLTGYLRN

SEQ ID NO: 1067 - protein, 166 aa, Homo sapiens
MSYNLLGFLQRSSNFQCQKLLWQLNGRLEYCLTDRMNFDIPEEIKQLQQFQKEDAALTIYEMLQNIFAIFRQDSSSTGWNETIVENLLANVYHQINHLKTVLEEKLEKEDFTRGKLMSSLHLKRYYGRILHYLKAKEYSHCAWTIVRVEILRNFYFINRLTGYLRN

SEQ ID NO: 1068 - protein, 166 aa, Homo sapiens
MSYNLLGFLQRSSNFQCQKLLWQLNGRLEYCLSDRMNFDIPEEIKQLQQFQKEDAALTIYEMLQNIFAIFRQDSSSTGWNETIVENLLANVYHQINHLKTVLEEKLEKEDFTRGKLMSSLHLKRYYGRILHYLKAKEYSHCAWTIVRVEILRNFYFINRLTGYLRN

SEQ ID NO: 1069 - protein, 166 aa, Homo sapiens
MSYNLLGFLQRSSNFQCQKLLWQLNGRLEYCLHDRMNFDIPEEIKQLQQFQKEDAALTIYEMLQNIFAIFRQDSSSTGWNETIVENLLANVYHQINHLKTVLEEKLEKEDFTRGKLMSSLHLKRYYGRILHYLKAKEYSHCAWTIVRVEILRNFYFINRLTGYLRN

SEQ ID NO: 1070 - protein, 166 aa, Homo sapiens
MSYNLLGFLQRSSNFQCQKLLWQLNGRLEYCLKDHMNFDIPEEIKQLQQFQKEDAALTIYEMLQNIFAIFRQDSSSTGWNETIVENLLANVYHQINHLKTVLEEKLEKEDFTRGKLMSSLHLKRYYGRILHYLKAKEYSHCAWTIVRVEILRNFYFINRLTGYLRN

SEQ ID NO: 1071 - protein, 166 aa, Homo sapiens
MSYNLLGFLQRSSNFQCQKLLWQLNGRLEYCLKDQMNFDIPEEIKQLQQFQKEDAALTIYEMLQNIFAIFRQDSSSTGWNETIVENLLANVYHQINHLKTVLEEKLEKEDFTRGKLMSSLHLKRYYGRILHYLKAKEYSHCAWTIVRVEILRNFYFINRLTGYLRN

SEQ ID NO: 1072 - protein, 166 aa, Homo sapiens
MSYNLLGFLQRSSNFQCQKLLWQLNGRLEYCLKDRVNFDIPEEIKQLQQFQKEDAALTIYEMLQNIFAIFRQDSSSTGWNETIVENLLANVYHQINHLKTVLEEKLEKEDFTRGKLMSSLHLKRYYGRILHYLKAKEYSHCAWTIVRVEILRNFYFINRLTGYLRN

SEQ ID NO: 1073 - protein, 166 aa, Homo sapiens
MSYNLLGFLQRSSNFQCQKLLWQLNGRLEYCLKDRINFDIPEEIKQLQQFQKEDAALTIYEMLQNIFAIFRQDSSSTGWNETIVENLLANVYHQINHLKTVLEEKLEKEDFTRGKLMSSLHLKRYYGRILHYLKAKEYSHCAWTIVRVEILRNFYFINRLTGYLRN

SEQ ID NO: 1074 - protein, 166 aa, Homo sapiens
MSYNLLGFLQRSSNFQCQKLLWQLNGRLEYCLKDRTNFDIPEEIKQLQQFQKEDAALTIYEMLQNIFAIFRQDSSSTGWNETIVENLLANVYHQINHLKTVLEEKLEKEDFTRGKLMSSLHLKRYYGRILHYLKAKEYSHCAWTIVRVEILRNFYFINRLTGYLRN

SEQ ID NO: 1075 - protein, 166 aa, Homo sapiens
MSYNLLGFLQRSSNFQCQKLLWQLNGRLEYCLKDRQNFDIPEEIKQLQQFQKEDAALTIYEMLQNIFAIFRQDSSSTGWNETIVENLLANVYHQINHLKTVLEEKLEKEDFTRGKLMSSLHLKRYYGRILHYLKAKEYSHCAWTIVRVEILRNFYFINRLTGYLRN

SEQ ID NO: 1076 - protein, 166 aa, Homo sapiens
MSYNLLGFLQRSSNFQCQKLLWQLNGRLEYCLKDRANFDIPEEIKQLQQFQKEDAALTIYEMLQNIFAIFRQDSSSTGWNETIVENLLANVYHQINHLKTVLEEKLEKEDFTRGKLMSSLHLKRYYGRILHYLKAKEYSHCAWTIVRVEILRNFYFINRLTGYLRN

SEQ ID NO: 1077 - protein, 166 aa, Homo sapiens
MSYNLLGFLQRSSNFQCQKLLWQLNGRLEYCLKDRMNFDIPEEIKQLQQFQKEDAALTIYEMLQNIFAIFRQDSSSTGWNETIVQNLLANVYHQINHLKTVLEEKLEKEDFTRGKLMSSLHLKRYYGRILHYLKAKEYSHCAWTIVRVEILRNFYFINRLTGYLRN

SEQ ID NO: 1078 - protein, 166 aa, Homo sapiens
MSYNLLGFLQRSSNFQCQKLLWQLNGRLEYCLKDRMNFDIPEEIKQLQQFQKEDAALTIYEMLQNIFAIFRQDSSSTGWNETIVHNLLANVYHQINHLKTVLEEKLEKEDFTRGKLMSSLHLKRYYGRILHYLKAKEYSHCAWTIVRVEILRNFYFINRLTGYLRN

SEQ ID NO: 1079 - protein, 166 aa, Homo sapiens
MSYNLLGFLQRSSNFQCQKLLWQLNGRLEYCLKDRMNFDIPEEIKQLQQFQKEDAALTIYEMLQNIFAIFRQDSSSTGWNETIVENLLANVHHQINHLKTVLEEKLEKEDFTRGKLMSSLHLKRYYGRILHYLKAKEYSHCAWTIVRVEILRNFYFINRLTGYLRN

SEQ ID NO: 1080 - protein, 166 aa, Homo sapiens
MSYNLLGFLQRSSNFQCQKLLWQLNGRLEYCLKDRMNFDIPEEIKQLQQFQKEDAALTIYEMLQNIFAIFRQDSSSTGWNETIVENLLANVIHQINHLKTVLEEKLEKEDFTRGKLMSSLHLKRYYGRILHYLKAKEYSHCAWTIVRVEILRNFYFINRLTGYLRN

SEQ ID NO: 1081 - protein, 166 aa, Homo sapiens
MSYNLLGFLQRSSNFQCQKLLWQLNGRLEYCLKDRMNFDIPEEIKQLQQFQKEDAALTIYEMLQNIFAIFRQDSSSTGWNETIVENLLANVYHQINHLQTVLEEKLEKEDFTRGKLMSSLHLKRYYGRILHYLKAKEYSHCAWTIVRVEILRNFYFINRLTGYLRN

SEQ ID NO: 1082 - protein, 166 aa, Homo sapiens
MSYNLLGFLQRSSNFQCQKLLWQLNGRLEYCLKDRMNFDIPEEIKQLQQFQKEDAALTIYEMLQNIFAIFRQDSSSTGWNETIVENLLANVYHQINHLTTVLEEKLEKEDFTRGKLMSSLHLKRYYGRILHYLKAKEYSHCAWTIVRVEILRNFYFINRLTGYLRN

SEQ ID NO: 1083 - protein, 166 aa, Homo sapiens
MSYNLLGFLQRSSNFQCQKLLWQLNGRLEYCLKDRMNFDIPEEIKQLQQFQKEDAALTIYEMLQNIFAIFRQDSSSTGWNETIVENLLANVYHQINHLSTVLEEKLEKEDFTRGKLMSSLHLKRYYGRILHYLKAKEYSHCAWTIVRVEILRNFYFINRLTGYLRN

SEQ ID NO: 1084 - protein, 166 aa, Homo sapiens
MSYNLLGFLQRSSNFQCQKLLWQLNGRLEYCLKDRMNFDIPEEIKQLQQFQKEDAALTIYEMLQNIFAIFRQDSSSTGWNETIVENLLANVYHQINHLHTVLEEKLEKEDFTRGKLMSSLHLKRYYGRILHYLKAKEYSHCAWTIVRVEILRNFYFINRLTGYLRN

SEQ ID NO: 1085 - protein, 166 aa, Homo sapiens
MSYNLLGFLQRSSNFQCQKLLWQLNGRLEYCLKDRMNFDIPEEIKQLQQFQKEDAALTIYEMLQNIFAIFRQDSSSTGWNETIVENLLANVYHQINHLKTVLQEKLEKEDFTRGKLMSSLHLKRYYGRILHYLKAKEYSHCAWTIVRVEILRNFYFINRLTGYLRN

SEQ ID NO: 1086 - protein, 166 aa, Homo sapiens
MSYNLLGFLQRSSNFQCQKLLWQLNGRLEYCLKDRMNFDIPEEIKQLQQFQKEDAALTIYEMLQNIFAIFRQDSSSTGWNETIVENLLANVYHQINHLKTVLHEKLEKEDFTRGKLMSSLHLKRYYGRILHYLKAKEYSHCAWTIVRVEILRNFYFINRLTGYLRN

SEQ ID NO: 1087 - protein, 166 aa, Homo sapiens
MSYNLLGFLQRSSNFQCQKLLWQLNGRLEYCLKDRMNFDIPEEIKQLQQFQKEDAALTIYEMLQNIFAIFRQDSSSTGWNETIVENLLANVYHQINHLKTVLEQKLEKEDFTRGKLMSSLHLKRYYGRILHYLKAKEYSHCAWTIVRVEILRNFYFINRLTGYLRN

SEQ ID NO: 1088 - protein, 166 aa, Homo sapiens
MSYNLLGFLQRSSNFQCQKLLWQLNGRLEYCLKDRMNFDIPEEIKQLQQFQKEDAALTIYEMLQNIFAIFRQDSSSTGWNETIVENLLANVYHQINHLKTVLEHKLEKEDFTRGKLMSSLHLKRYYGRILHYLKAKEYSHCAWTIVRVEILRNFYFINRLTGYLRN

SEQ ID NO: 1089 - protein, 166 aa, Homo sapiens
MSYNLLGFLQRSSNFQCQKLLWQLNGRLEYCLKDRMNFDIPEEIKQLQQFQKEDAALTIYEMLQNIFAIFRQDSSSTGWNETIVENLLANVYHQINHLKTVLEEQLEKEDFTRGKLMSSLHLKRYYGRILHYLKAKEYSHCAWTIVRVEILRNFYFINRLTGYLRN

SEQ ID NO: 1090 - protein, 166 aa, Homo sapiens
MSYNLLGFLQRSSNFQCQKLLWQLNGRLEYCLKDRMNFDIPEEIKQLQQFQKEDAALTIYEMLQNIFAIFRQDSSSTGWNETIVENLLANVYHQINHLKTVLEETLEKEDFTRGKLMSSLHLKRYYGRILHYLKAKEYSHCAWTIVRVEILRNFYFINRLTGYLRN

SEQ ID NO: 1091 - protein, 166 aa, Homo sapiens
MSYNLLGFLQRSSNFQCQKLLWQLNGRLEYCLKDRMNFDIPEEIKQLQQFQKEDAALTIYEMLQNIFAIFRQDSSSTGWNETIVENLLANVYHQINHLKTVLEESLEKEDFTRGKLMSSLHLKRYYGRILHYLKAKEYSHCAWTIVRVEILRNFYFINRLTGYLRN

SEQ ID NO: 1092 - protein, 166 aa, Homo sapiens
MSYNLLGFLQRSSNFQCQKLLWQLNGRLEYCLKDRMNFDIPEEIKQLQQFQKEDAALTIYEMLQNIFAIFRQDSSSTGWNETIVENLLANVYHQINHLKTVLEEHLEKEDFTRGKLMSSLHLKRYYGRILHYLKAKEYSHCAWTIVRVEILRNFYFINRLTGYLRN

SEQ ID NO: 1093 - protein, 166 aa, Homo sapiens
MSYNLLGFLQRSSNFQCQKLLWQLNGRLEYCLKDRMNFDIPEEIKQLQQFQKEDAALTIYEMLQNIFAIFRQDSSSTGWNETIVENLLANVYHQINHLKTVLEEKLEKEDFTRGKLMSSLHLKRYYGRILHYLKAKEHSHCAWTIVRVEILRNFYFINRLTGYLRN

SEQ ID NO: 1094 - protein, 166 aa, Homo sapiens
MSYNLLGFLQRSSNFQCQKLLWQLNGRLEYCLKDRMNFDIPEEIKQLQQFQKEDAALTIYEMLQNIFAIFRQDSSSTGWNETIVENLLANVYHQINHLKTVLEEKLEKEDFTRGKLMSSLHLKRYYGRILHYLKAKEISHCAWTIVRVEILRNFYFINRLTGYLRN

SEQ ID NO: 1095 - protein, 166 aa, Homo sapiens
MSYNLLGFLQRSSNFQCQKLLWQLNGRLEYCLKDRMNFDIPEEIKQLQQFQKEDAALTIYEMLQNIFAIFRQDSSSTGWNETIVENLLANVYHQINHLKTVLEEKLEKEDFTRGKLMSSLHLKRYYGRILHYLKAKEYSHCAWTIVRVEILHNFYFINRLTGYLRN

SEQ ID NO: 1096 - protein, 166 aa, Homo sapiens
MSYNLLGFLQRSSNFQCQKLLWQLNGRLEYCLKDRMNFDIPEEIKQLQQFQKEDAALTIYEMLQNIFAIFRQDSSSTGWNETIVENLLANVYHQINHLKTVLEEKLEKEDFTRGKLMSSLHLKRYYGRILHYLKAKEYSHCAWTIVRVEILQNFYFINRLTGYLRN

SEQ ID NO: 1097 - protein, 166 aa, Homo sapiens
MSYNLLGFLQRSSNFQCQKLLWQLNGRLEYCLKDRMNFDIPEEIKQLQQFQKEDAALTIYEMLQNIFAIFRQDSSSTGWNETIVENLLANVYHQINHLKTVLEEKLEKEDFTRGKLMSSLHLKRYYGRILHYLKAKEYSHCAWTIVRVEILRNFHFINRLTGYLRN

SEQ ID NO: 1098 - protein, 166 aa, Homo sapiens
MSYNLLGFLQRSSNFQCQKLLWQLNGRLEYCLKDRMNFDIPEEIKQLQQFQKEDAALTIYEMLQNIFAIFRQDSSSTGWNETIVENLLANVYHQINHLKTVLEEKLEKEDFTRGKLMSSLHLKRYYGRILHYLKAKEYSHCAWTIVRVEILRNFIFINRLTGYLRN

SEQ ID NO: 1099 - protein, 166 aa, Homo sapiens
MSYNLLGFLQRSSNFQCQKLLWQLNGRLEYCLKDRMNFDIPEEIKQLQQFQKEDAALTIYEMLQNIFAIFRQDSSSTGWNETIVENLLANVYHQINHLKTVLEEKLEKEDFTRGKLMSSLHLKRYYGRILHYLKAKEYSHCAWTIVRVEILRNFYFINHLTGYLRN

SEQ ID NO: 1100 - protein, 166 aa, Homo sapiens
MSYNLLGFLQRSSNFQCQKLLWQLNGRLEYCLKDRMNFDIPEEIKQLQQFQKEDAALTIYEMLQNIFAIFRQDSSSTGWNETIVENLLANVYHQINHLKTVLEEKLEKEDFTRGKLMSSLHLKRYYGRILHYLKAKEYSHCAWTIVRVEILRNFYFINQLTGYLRN

SEQ ID NO: 1101 - protein, 166 aa, Homo sapiens
DSYNLLGFLQRSSNFQCQKLLWQLNGRLEYCLKDRMNFDIPEEIKQLQQFQKEDAALTIYEMLQNIFAIFRQDSSSTGWNETIVENLLANVYHQINHLKTVLEEKLEKEDFTRGKLMSSLHLKRYYGRILHYLKAKEYSHCAWTIVRVEILRNFYFINRLTGYLRN

SEQ ID NO: 1102 - protein, 166 aa, Homo sapiens
ESYNLLGFLQRSSNFQCQKLLWQLNGRLEYCLKDRMNFDIPEEIKQLQQFQKEDAALTIYEMLQNIFAIFRQDSSSTGWNETIVENLLANVYHQINHLKTVLEEKLEKEDFTRGKLMSSLHLKRYYGRILHYLKAKEYSHCAWTIVRVEILRNFYFINRLTGYLRN

SEQ ID NO: 1103 - protein, 166 aa, Homo sapiens
KSYNLLGFLQRSSNFQCQKLLWQLNGRLEYCLKDRMNFDIPEEIKQLQQFQKEDAALTIYEMLQNIFAIFRQDSSSTGWNETIVENLLANVYHQINHLKTVLEEKLEKEDFTRGKLMSSLHLKRYYGRILHYLKAKEYSHCAWTIVRVEILRNFYFINRLTGYLRN

SEQ ID NO: 1104 - protein, 166 aa, Homo sapiens
NSYNLLGFLQRSSNFQCQKLLWQLNGRLEYCLKDRMNFDIPEEIKQLQQFQKEDAALTIYEMLQNIFAIFRQDSSSTGWNETIVENLLANVYHQINHLKTVLEEKLEKEDFTRGKLMSSLHLKRYYGRILHYLKAKEYSHCAWTIVRVEILRNFYFINRLTGYLRN

SEQ ID NO: 1105 - protein, 166 aa, Homo sapiens
RSYNLLGFLQRSSNFQCQKLLWQLNGRLEYCLKDRMNFDIPEEIKQLQQFQKEDAALTIYEMLQNIFAIFRQDSSSTGWNETIVENLLANVYHQINHLKTVLEEKLEKEDFTRGKLMSSLHLKRYYGRILHYLKAKEYSHCAWTIVRVEILRNFYFINRLTGYLRN

SEQ ID NO: 1106 - protein, 166 aa, Homo sapiens
SSYNLLGFLQRSSNFQCQKLLWQLNGRLEYCLKDRMNFDIPEEIKQLQQFQKEDAALTIYEMLQNIFAIFRQDSSSTGWNETIVENLLANVYHQINHLKTVLEEKLEKEDFTRGKLMSSLHLKRYYGRILHYLKAKEYSHCAWTIVRVEILRNFYFINRLTGYLRN

SEQ ID NO: 1107 - protein, 166 aa, Homo sapiens
MSYNDLGFLQRSSNFQCQKLLWQLNGRLEYCLKDRMNFDIPEEIKQLQQFQKEDAALTIYEMLQNIFAIFRQDSSSTGWNETIVENLLANVYHQINHLKTVLEEKLEKEDFTRGKLMSSLHLKRYYGRILHYLKAKEYSHCAWTIVRVEILRNFYFINRLTGYLRN

SEQ ID NO: 1108 - protein, 166 aa, Homo sapiens
MSYNELGFLQRSSNFQCQKLLWQLNGRLEYCLKDRMNFDIPEEIKQLQQFQKEDAALTIYEMLQNIFAIFRQDSSSTGWNETIVENLLANVYHQINHLKTVLEEKLEKEDFTRGKLMSSLHLKRYYGRILHYLKAKEYSHCAWTIVRVEILRNFYFINRLTGYLRN

SEQ ID NO: 1109 - protein, 166 aa, Homo sapiens
MSYNKLGFLQRSSNFQCQKLLWQLNGRLEYCLKDRMNFDIPEEIKQLQQFQKEDAALTIYEMLQNIFAIFRQDSSSTGWNETIVENLLANVYHQINHLKTVLEEKLEKEDFTRGKLMSSLHLKRYYGRILHYLKAKEYSHCAWTIVRVEILRNFYFINRLTGYLRN

SEQ ID NO: 1110 - protein, 166 aa, Homo sapiens
MSYNRLGFLQRSSNFQCQKLLWQLNGRLEYCLKDRMNFDIPEEIKQLQQFQKEDAALTIYEMLQNIFAIFRQDSSSTGWNETIVENLLANVYHQINHLKTVLEEKLEKEDFTRGKLMSSLHLKRYYGRILHYLKAKEYSHCAWTIVRVEILRNFYFINRLTGYLRN

SEQ ID NO: 1111 - protein, 166 aa, Homo sapiens
MSYNNLGFLQRSSNFQCQKLLWQLNGRLEYCLKDRMNFDIPEEIKQLQQFQKEDAALTIYEMLQNIFAIFRQDSSSTGWNETIVENLLANVYHQINHLKTVLEEKLEKEDFTRGKLMSSLHLKRYYGRILHYLKAKEYSHCAWTIVRVEILRNFYFINRLTGYLRN

SEQ ID NO: 1112 - protein, 166 aa, Homo sapiens
MSYNSLGFLQRSSNFQCQKLLWQLNGRLEYCLKDRMNFDIPEEIKQLQQFQKEDAALTIYEMLQNIFAIFRQDSSSTGWNETIVENLLANVYHQINHLKTVLEEKLEKEDFTRGKLMSSLHLKRYYGRILHYLKAKEYSHCAWTIVRVEILRNFYFINRLTGYLRN

SEQ ID NO: 1113 - protein, 166 aa, Homo sapiens
MSYNLDGFLQRSSNFQCQKLLWQLNGRLEYCLKDRMNFDIPEEIKQLQQFQKEDAALTIYEMLQNIFAIFRQDSSSTGWNETIVENLLANVYHQINHLKTVLEEKLEKEDFTRGKLMSSLHLKRYYGRILHYLKAKEYSHCAWTIVRVEILRNFYFINRLTGYLRN

SEQ ID NO: 1114 - protein, 166 aa, Homo sapiens
MSYNLEGFLQRSSNFQCQKLLWQLNGRLEYCLKDRMNFDIPEEIKQLQQFQKEDAALTIYEMLQNIFAIFRQDSSSTGWNETIVENLLANVYHQINHLKTVLEEKLEKEDFTRGKLMSSLHLKRYYGRILHYLKAKEYSHCAWTIVRVEILRNFYFINRLTGYLRN

SEQ ID NO: 1115 - protein, 166 aa, Homo sapiens
MSYNLKGFLQRSSNFQCQKLLWQLNGRLEYCLKDRMNFDIPEEIKQLQQFQKEDAALTIYEMLQNIFAIFRQDSSSTGWNETIVENLLANVYHQINHLKTVLEEKLEKEDFTRGKLMSSLHLKRYYGRILHYLKAKEYSHCAWTIVRVEILRNFYFINRLTGYLRN

SEQ ID NO: 1116 - protein, 166 aa, Homo sapiens
MSYNLNGFLQRSSNFQCQKLLWQLNGRLEYCLKDRMNFDIPEEIKQLQQFQKEDAALTIYEMLQNIFAIFRQDSSSTGWNETIVENLLANVYHQINHLKTVLEEKLEKEDFTRGKLMSSLHLKRYYGRILHYLKAKEYSHCAWTIVRVEILRNFYFINRLTGYLRN

SEQ ID NO: 1117 - protein, 166 aa, Homo sapiens
MSYNLQGFLQRSSNFQCQKLLWQLNGRLEYCLKDRMNFDIPEEIKQLQQFQKEDAALTIYEMLQNIFAIFRQDSSSTGWNETIVENLLANVYHQINHLKTVLEEKLEKEDFTRGKLMSSLHLKRYYGRILHYLKAKEYSHCAWTIVRVEILRNFYFINRLTGYLRN

SEQ ID NO: 1118 - protein, 166 aa, Homo sapiens
MSYNLRGFLQRSSNFQCQKLLWQLNGRLEYCLKDRMNFDIPEEIKQLQQFQKEDAALTIYEMLQNIFAIFRQDSSSTGWNETIVENLLANVYHQINHLKTVLEEKLEKEDFTRGKLMSSLHLKRYYGRILHYLKAKEYSHCAWTIVRVEILRNFYFINRLTGYLRN

SEQ ID NO: 1119 - protein, 166 aa, Homo sapiens
MSYNLSGFLQRSSNFQCQKLLWQLNGRLEYCLKDRMNFDIPEEIKQLQQFQKEDAALTIYEMLQNIFAIFRQDSSSTGWNETIVENLLANVYHQINHLKTVLEEKLEKEDFTRGKLMSSLHLKRYYGRILHYLKAKEYSHCAWTIVRVEILRNFYFINRLTGYLRN

SEQ ID NO: 1120 - protein, 166 aa, Homo sapiens
MSYNLTGFLQRSSNFQCQKLLWQLNGRLEYCLKDRMNFDIPEEIKQLQQFQKEDAALTIYEMLQNIFAIFRQDSSSTGWNETIVENLLANVYHQINHLKTVLEEKLEKEDFTRGKLMSSLHLKRYYGRILHYLKAKEYSHCAWTIVRVEILRNFYFINRLTGYLRN

SEQ ID NO: 1121 - protein, 166 aa, Homo sapiens
MSYNLLGDLQRSSNFQCQKLLWQLNGRLEYCLKDRMNFDIPEEIKQLQQFQKEDAALTIYEMLQNIFAIFRQDSSSTGWNETIVENLLANVYHQINHLKTVLEEKLEKEDFTRGKLMSSLHLKRYYGRILHYLKAKEYSHCAWTIVRVEILRNFYFINRLTGYLRN

SEQ ID NO: 1122 - protein, 166 aa, Homo sapiens
MSYNLLGELQRSSNFQCQKLLWQLNGRLEYCLKDRMNFDIPEEIKQLQQFQKEDAALTIYEMLQNIFAIFRQDSSSTGWNETIVENLLANVYHQINHLKTVLEEKLEKEDFTRGKLMSSLHLKRYYGRILHYLKAKEYSHCAWTIVRVEILRNFYFINRLTGYLRN

SEQ ID NO: 1123 - protein, 166 aa, Homo sapiens
MSYNLLGKLQRSSNFQCQKLLWQLNGRLEYCLKDRMNFDIPEEIKQLQQFQKEDAALTIYEMLQNIFAIFRQDSSSTGWNETIVENLLANVYHQINHLKTVLEEKLEKEDFTRGKLMSSLHLKRYYGRILHYLKAKEYSHCAWTIVRVEILRNFYFINRLTGYLRN

SEQ ID NO: 1124 - protein, 166 aa, Homo sapiens
MSYNLLGRLQRSSNFQCQKLLWQLNGRLEYCLKDRMNFDIPEEIKQLQQFQKEDAALTIYEMLQNIFAIFRQDSSSTGWNETIVENLLANVYHQINHLKTVLEEKLEKEDFTRGKLMSSLHLKRYYGRILHYLKAKEYSHCAWTIVRVEILRNFYFINRLTGYLRN

SEQ ID NO: 1125 - protein, 166 aa, Homo sapiens
MSYNLLGFDQRSSNFQCQKLLWQLNGRLEYCLKDRMNFDIPEEIKQLQQFQKEDAALTIYEMLQNIFAIFRQDSSSTGWNETIVENLLANVYHQINHLKTVLEEKLEKEDFTRGKLMSSLHLKRYYGRILHYLKAKEYSHCAWTIVRVEILRNFYFINRLTGYLRN

SEQ ID NO: 1126 - protein, 166 aa, Homo sapiens
MSYNLLGFEQRSSNFQCQKLLWQLNGRLEYCLKDRMNFDIPEEIKQLQQFQKEDAALTIYEMLQNIFAIFRQDSSSTGWNETIVENLLANVYHQINHLKTVLEEKLEKEDFTRGKLMSSLHLKRYYGRILHYLKAKEYSHCAWTIVRVEILRNFYFINRLTGYLRN

SEQ ID NO: 1127 - protein, 166 aa, Homo sapiens
MSYNLLGFKQRSSNFQCQKLLWQLNGRLEYCLKDRMNFDIPEEIKQLQQFQKEDAALTIYEMLQNIFAIFRQDSSSTGWNETIVENLLANVYHQINHLKTVLEEKLEKEDFTRGKLMSSLHLKRYYGRILHYLKAKEYSHCAWTIVRVEILRNFYFINRLTGYLRN

SEQ ID NO: 1128 - protein, 166 aa, Homo sapiens
MSYNLLGFNQRSSNFQCQKLLWQLNGRLEYCLKDRMNFDIPEEIKQLQQFQKEDAALTIYEMLQNIFAIFRQDSSSTGWNETIVENLLANVYHQINHLKTVLEEKLEKEDFTRGKLMSSLHLKRYYGRILHYLKAKEYSHCAWTIVRVEILRNFYFINRLTGYLRN

SEQ ID NO: 1129 - protein, 166 aa, Homo sapiens
MSYNLLGFRQRSSNFQCQKLLWQLNGRLEYCLKDRMNFDIPEEIKQLQQFQKEDAALTIYEMLQNIFAIFRQDSSSTGWNETIVENLLANVYHQINHLKTVLEEKLEKEDFTRGKLMSSLHLKRYYGRILHYLKAKEYSHCAWTIVRVEILRNFYFINRLTGYLRN

SEQ ID NO: 1130 - protein, 166 aa, Homo sapiens
MSYNLLGFSQRSSNFQCQKLLWQLNGRLEYCLKDRMNFDIPEEIKQLQQFQKEDAALTIYEMLQNIFAIFRQDSSSTGWNETIVENLLANVYHQINHLKTVLEEKLEKEDFTRGKLMSSLHLKRYYGRILHYLKAKEYSHCAWTIVRVEILRNFYFINRLTGYLRN

SEQ ID NO: 1131 - protein, 166 aa, Homo sapiens
MSYNLLGFLDRSSNFQCQKLLWQLNGRLEYCLKDRMNFDIPEEIKQLQQFQKEDAALTIYEMLQNIFAIFRQDSSSTGWNETIVENLLANVYHQINHLKTVLEEKLEKEDFTRGKLMSSLHLKRYYGRILHYLKAKEYSHCAWTIVRVEILRNFYFINRLTGYLRN

SEQ ID NO: 1132 - protein, 166 aa, Homo sapiens
MSYNLLGFLERSSNFQCQKLLWQLNGRLEYCLKDRMNFDIPEEIKQLQQFQKEDAALTIYEMLQNIFAIFRQDSSSTGWNETIVENLLANVYHQINHLKTVLEEKLEKEDFTRGKLMSSLHLKRYYGRILHYLKAKEYSHCAWTIVRVEILRNFYFINRLTGYLRN

SEQ ID NO: 1133 - protein, 166 aa, Homo sapiens
MSYNLLGFLKRSSNFQCQKLLWQLNGRLEYCLKDRMNFDIPEEIKQLQQFQKEDAALTIYEMLQNIFAIFRQDSSSTGWNETIVENLLANVYHQINHLKTVLEEKLEKEDFTRGKLMSSLHLKRYYGRILHYLKAKEYSHCAWTIVRVEILRNFYFINRLTGYLRN

SEQ ID NO: 1134 - protein, 166 aa, Homo sapiens
MSYNLLGFLNRSSNFQCQKLLWQLNGRLEYCLKDRMNFDIPEEIKQLQQFQKEDAALTIYEMLQNIFAIFRQDSSSTGWNETIVENLLANVYHQINHLKTVLEEKLEKEDFTRGKLMSSLHLKRYYGRILHYLKAKEYSHCAWTIVRVEILRNFYFINRLTGYLRN

SEQ ID NO: 1135 - protein, 166 aa, Homo sapiens
MSYNLLGFLRRSSNFQCQKLLWQLNGRLEYCLKDRMNFDIPEEIKQLQQFQKEDAALTIYEMLQNIFAIFRQDSSSTGWNETIVENLLANVYHQINHLKTVLEEKLEKEDFTRGKLMSSLHLKRYYGRILHYLKAKEYSHCAWTIVRVEILRNFYFINRLTGYLRN

SEQ ID NO: 1136 - protein, 166 aa, Homo sapiens
MSYNLLGFLSRSSNFQCQKLLWQLNGRLEYCLKDRMNFDIPEEIKQLQQFQKEDAALTIYEMLQNIFAIFRQDSSSTGWNETIVENLLANVYHQINHLKTVLEEKLEKEDFTRGKLMSSLHLKRYYGRILHYLKAKEYSHCAWTIVRVEILRNFYFINRLTGYLRN

SEQ ID NO: 1137 - protein, 166 aa, Homo sapiens
MSYNLLGFLTRSSNFQCQKLLWQLNGRLEYCLKDRMNFDIPEEIKQLQQFQKEDAALTIYEMLQNIFAIFRQDSSSTGWNETIVENLLANVYHQINHLKTVLEEKLEKEDFTRGKLMSSLHLKRYYGRILHYLKAKEYSHCAWTIVRVEILRNFYFINRLTGYLRN

SEQ ID NO: 1138 - protein, 166 aa, Homo sapiens
MSYNLLGFLQRDSNFQCQKLLWQLNGRLEYCLKDRMNFDIPEEIKQLQQFQKEDAALTIYEMLQNIFAIFRQDSSSTGWNETIVENLLANVYHQINHLKTVLEEKLEKEDFTRGKLMSSLHLKRYYGRILHYLKAKEYSHCAWTIVRVEILRNFYFINRLTGYLRN

SEQ ID NO: 1139 - protein, 166 aa, Homo sapiens
MSYNLLGFLQRESNFQCQKLLWQLNGRLEYCLKDRMNFDIPEEIKQLQQFQKEDAALTIYEMLQNIFAIFRQDSSSTGWNETIVENLLANVYHQINHLKTVLEEKLEKEDFTRGKLMSSLHLKRYYGRILHYLKAKEYSHCAWTIVRVEILRNFYFINRLTGYLRN

SEQ ID NO: 1140 - protein, 166 aa, Homo sapiens
MSYNLLGFLQRKSNFQCQKLLWQLNGRLEYCLKDRMNFDIPEEIKQLQQFQKEDAALTIYEMLQNIFAIFRQDSSSTGWNETIVENLLANVYHQINHLKTVLEEKLEKEDFTRGKLMSSLHLKRYYGRILHYLKAKEYSHCAWTIVRVEILRNFYFINRLTGYLRN

SEQ ID NO: 1141 - protein, 166 aa, Homo sapiens
MSYNLLGFLQRRSNFQCQKLLWQLNGRLEYCLKDRMNFDIPEEIKQLQQFQKEDAALTIYEMLQNIFAIFRQDSSSTGWNETIVENLLANVYHQINHLKTVLEEKLEKEDFTRGKLMSSLHLKRYYGRILHYLKAKEYSHCAWTIVRVEILRNFYFINRLTGYLRN

SEQ ID NO: 1142 - protein, 166 aa, Homo sapiens
MSYNLLGFLQRSDNFQCQKLLWQLNGRLEYCLKDRMNFDIPEEIKQLQQFQKEDAALTIYEMLQNIFAIFRQDSSSTGWNETIVENLLANVYHQINHLKTVLEEKLEKEDFTRGKLMSSLHLKRYYGRILHYLKAKEYSHCAWTIVRVEILRNFYFINRLTGYLRN

SEQ ID NO: 1143 - protein, 166 aa, Homo sapiens
MSYNLLGFLQRSENFQCQKLLWQLNGRLEYCLKDRMNFDIPEEIKQLQQFQKEDAALTIYEMLQNIFAIFRQDSSSTGWNETIVENLLANVYHQINHLKTVLEEKLEKEDFTRGKLMSSLHLKRYYGRILHYLKAKEYSHCAWTIVRVEILRNFYFINRLTGYLRN

SEQ ID NO: 1144 - protein, 166 aa, Homo sapiens
MSYNLLGFLQRSKNFQCQKLLWQLNGRLEYCLKDRMNFDIPEEIKQLQQFQKEDAALTIYEMLQNIFAIFRQDSSSTGWNETIVENLLANVYHQINHLKTVLEEKLEKEDFTRGKLMSSLHLKRYYGRILHYLKAKEYSHCAWTIVRVEILRNFYFINRLTGYLRN

SEQ ID NO: 1145 - protein, 166 aa, Homo sapiens
MSYNLLGFLQRSNNFQCQKLLWQLNGRLEYCLKDRMNFDIPEEIKQLQQFQKEDAALTIYEMLQNIFAIFRQDSSSTGWNETIVENLLANVYHQINHLKTVLEEKLEKEDFTRGKLMSSLHLKRYYGRILHYLKAKEYSHCAWTIVRVEILRNFYFINRLTGYLRN

SEQ ID NO: 1146 - protein, 166 aa, Homo sapiens
MSYNLLGFLQRSQNFQCQKLLWQLNGRLEYCLKDRMNFDIPEEIKQLQQFQKEDAALTIYEMLQNIFAIFRQDSSSTGWNETIVENLLANVYHQINHLKTVLEEKLEKEDFTRGKLMSSLHLKRYYGRILHYLKAKEYSHCAWTIVRVEILRNFYFINRLTGYLRN

SEQ ID NO: 1147 - protein, 166 aa, Homo sapiens [sequence omitted]

SEQ ID NO: 1148 - protein, 166 aa, Homo sapiens
MSYNLLGFLQRSTNFQCQKLLWQLNGRLEYCLKDRMNFDIPEEIKQLQQFQKEDAALTIYEMLQNIFAIFRQDSSSTGWNETIVENLLANVYHQINHLKTVLEEKLEKEDFTRGKLMSSLHLKRYYGRILHYLKAKEYSHCAWTIVRVEILRNFYFINRLTGYLRN

SEQ ID NO: 1149 - protein, 166 aa, Homo sapiens
MSYNLLGFLQRSSDFQCQKLLWQLNGRLEYCLKDRMNFDIPEEIKQLQQFQKEDAALTIYEMLQNIFAIFRQDSSSTGWNETIVENLLANVYHQINHLKTVLEEKLEKEDFTRGKLMSSLHLKRYYGRILHYLKAKEYSHCAWTIVRVEILRNFYFINRLTGYLRN

SEQ ID NO: 1150 - protein, 166 aa, Homo sapiens
MSYNLLGFLQRSSEFQCQKLLWQLNGRLEYCLKDRMNFDIPEEIKQLQQFQKEDAALTIYEMLQNIFAIFRQDSSSTGWNETIVENLLANVYHQINHLKTVLEEKLEKEDFTRGKLMSSLHLKRYYGRILHYLKAKEYSHCAWTIVRVEILRNFYFINRLTGYLRN

SEQ ID NO: 1151 - protein, 166 aa, Homo sapiens
MSYNLLGFLQRSSKFQCQKLLWQLNGRLEYCLKDRMNFDIPEEIKQLQQFQKEDAALTIYEMLQNIFAIFRQDSSSTGWNETIVENLLANVYHQINHLKTVLEEKLEKEDFTRGKLMSSLHLKRYYGRILHYLKAKEYSHCAWTIVRVEILRNFYFINRLTGYLRN

SEQ ID NO: 1152 - protein, 166 aa, Homo sapiens
MSYNLLGFLQRSSQFQCQKLLWQLNGRLEYCLKDRMNFDIPEEIKQLQQFQKEDAALTIYEMLQNIFAIFRQDSSSTGWNETIVENLLANVYHQINHLKTVLEEKLEKEDFTRGKLMSSLHLKRYYGRILHYLKAKEYSHCAWTIVRVEILRNFYFINRLTGYLRN

SEQ ID NO: 1153 - protein, 166 aa, Homo sapiens
MSYNLLGFLQRSSRFQCQKLLWQLNGRLEYCLKDRMNFDIPEEIKQLQQFQKEDAALTIYEMLQNIFAIFRQDSSSTGWNETIVENLLANVYHQINHLKTVLEEKLEKEDFTRGKLMSSLHLKRYYGRILHYLKAKEYSHCAWTIVRVEILRNFYFINRLTGYLRN

SEQ ID NO: 1154 - protein, 166 aa, Homo sapiens
MSYNLLGFLQRSSSFQCQKLLWQLNGRLEYCLKDRMNFDIPEEIKQLQQFQKEDAALTIYEMLQNIFAIFRQDSSSTGWNETIVENLLANVYHQINHLKTVLEEKLEKEDFTRGKLMSSLHLKRYYGRILHYLKAKEYSHCAWTIVRVEILRNFYFINRLTGYLRN

SEQ ID NO: 1155 - protein, 166 aa, Homo sapiens
MSYNLLGFLQRSSTFQCQKLLWQLNGRLEYCLKDRMNFDIPEEIKQLQQFQKEDAALTIYEMLQNIFAIFRQDSSSTGWNETIVENLLANVYHQINHLKTVLEEKLEKEDFTRGKLMSSLHLKRYYGRILHYLKAKEYSHCAWTIVRVEILRNFYFINRLTGYLRN

SEQ ID NO: 1156 - protein, 166 aa, Homo sapiens
MSYNLLGFLQRSSNDQCQKLLWQLNGRLEYCLKDRMNFDIPEEIKQLQQFQKEDAALTIYEMLQNIFAIFRQDSSSTGWNETIVENLLANVYHQINHLKTVLEEKLEKEDFTRGKLMSSLHLKRYYGRILHYLKAKEYSHCAWTIVRVEILRNFYFINRLTGYLRN

SEQ ID NO: 1157 - protein, 166 aa, Homo sapiens
MSYNLLGFLQRSSNEQCQKLLWQLNGRLEYCLKDRMNFDIPEEIKQLQQFQKEDAALTIYEMLQNIFAIFRQDSSSTGWNETIVENLLANVYHQINHLKTVLEEKLEKEDFTRGKLMSSLHLKRYYGRILHYLKAKEYSHCAWTIVRVEILRNFYFINRLTGYLRN

SEQ ID NO: 1158 - protein, 166 aa, Homo sapiens
MSYNLLGFLQRSSNKQCQKLLWQLNGRLEYCLKDRMNFDIPEEIKQLQQFQKEDAALTIYEMLQNIFAIFRQDSSSTGWNETIVENLLANVYHQINHLKTVLEEKLEKEDFTRGKLMSSLHLKRYYGRILHYLKAKEYSHCAWTIVRVEILRNFYFINRLTGYLRN

SEQ ID NO: 1159 - protein, 166 aa, Homo sapiens
MSYNLLGFLQRSSNRQCQKLLWQLNGRLEYCLKDRMNFDIPEEIKQLQQFQKEDAALTIYEMLQNIFAIFRQDSSSTGWNETIVENLLANVYHQINHLKTVLEEKLEKEDFTRGKLMSSLHLKRYYGRILHYLKAKEYSHCAWTIVRVEILRNFYFINRLTGYLRN

SEQ ID NO: 1160 - protein, 166 aa, Homo sapiens
MSYNLLGFLQRSSNFDCQKLLWQLNGRLEYCLKDRMNFDIPEEIKQLQQFQKEDAALTIYEMLQNIFAIFRQDSSSTGWNETIVENLLANVYHQINHLKTVLEEKLEKEDFTRGKLMSSLHLKRYYGRILHYLKAKEYSHCAWTIVRVEILRNFYFINRLTGYLRN

SEQ ID NO: 1161 - protein, 166 aa, Homo sapiens
MSYNLLGFLQRSSNFECQKLLWQLNGRLEYCLKDRMNFDIPEEIKQLQQFQKEDAALTIYEMLQNIFAIFRQDSSSTGWNETIVENLLANVYHQINHLKTVLEEKLEKEDFTRGKLMSSLHLKRYYGRILHYLKAKEYSHCAWTIVRVEILRNFYFINRLTGYLRN

SEQ ID NO: 1162 - protein, 166 aa, Homo sapiens
MSYNLLGFLQRSSNFKCQKLLWQLNGRLEYCLKDRMNFDIPEEIKQLQQFQKEDAALTIYEMLQNIFAIFRQDSSSTGWNETIVENLLANVYHQINHLKTVLEEKLEKEDFTRGKLMSSLHLKRYYGRILHYLKAKEYSHCAWTIVRVEILRNFYFINRLTGYLRN

SEQ ID NO: 1163 - protein, 166 aa, Homo sapiens
MSYNLLGFLQRSSNFNCQKLLWQLNGRLEYCLKDRMNFDIPEEIKQLQQFQKEDAALTIYEMLQNIFAIFRQDSSSTGWNETIVENLLANVYHQINHLKTVLEEKLEKEDFTRGKLMSSLHLKRYYGRILHYLKAKEYSHCAWTIVRVEILRNFYFINRLTGYLRN

SEQ ID NO: 1164 - protein, 166 aa, Homo sapiens
MSYNLLGFLQRSSNFRCQKLLWQLNGRLEYCLKDRMNFDIPEEIKQLQQFQKEDAALTIYEMLQNIFAIFRQDSSSTGWNETIVENLLANVYHQINHLKTVLEEKLEKEDFTRGKLMSSLHLKRYYGRILHYLKAKEYSHCAWTIVRVEILRNFYFINRLTGYLRN

SEQ ID NO: 1165 - protein, 166 aa, Homo sapiens
MSYNLLGFLQRSSNFSCQKLLWQLNGRLEYCLKDRMNFDIPEEIKQLQQFQKEDAALTIYEMLQNIFAIFRQDSSSTGWNETIVENLLANVYHQINHLKTVLEEKLEKEDFTRGKLMSSLHLKRYYGRILHYLKAKEYSHCAWTIVRVEILRNFYFINRLTGYLRN

SEQ ID NO: 1166 - protein, 166 aa, Homo sapiens
MSYNLLGFLQRSSNFTCQKLLWQLNGRLEYCLKDRMNFDIPEEIKQLQQFQKEDAALTIYEMLQNIFAIFRQDSSSTGWNETIVENLLANVYHQINHLKTVLEEKLEKEDFTRGKLMSSLHLKRYYGRILHYLKAKEYSHCAWTIVRVEILRNFYFINRLTGYLRN

SEQ ID NO: 1167 - protein, 166 aa, Homo sapiens
MSYNLLGFLQRSSNFQDQKLLWQLNGRLEYCLKDRMNFDIPEEIKQLQQFQKEDAALTIYEMLQNIFAIFRQDSSSTGWNETIVENLLANVYHQINHLKTVLEEKLEKEDFTRGKLMSSLHLKRYYGRILHYLKAKEYSHCAWTIVRVEILRNFYFINRLTGYLRN

SEQ ID NO: 1168 - protein, 166 aa, Homo sapiens
MSYNLLGFLQRSSNFQEQKLLWQLNGRLEYCLKDRMNFDIPEEIKQLQQFQKEDAALTIYEMLQNIFAIFRQDSSSTGWNETIVENLLANVYHQINHLKTVLEEKLEKEDFTRGKLMSSLHLKRYYGRILHYLKAKEYSHCAWTIVRVEILRNFYFINRLTGYLRN

SEQ ID NO: 1169 - protein, 166 aa, Homo sapiens
MSYNLLGFLQRSSNFQKQKLLWQLNGRLEYCLKDRMNFDIPEEIKQLQQFQKEDAALTIYEMLQNIFAIFRQDSSSTGWNETIVENLLANVYHQINHLKTVLEEKLEKEDFTRGKLMSSLHLKRYYGRILHYLKAKEYSHCAWTIVRVEILRNFYFINRLTGYLRN

SEQ ID NO: 1170 - protein, 166 aa, Homo sapiens
MSYNLLGFLQRSSNFQNQKLLWQLNGRLEYCLKDRMNFDIPEEIKQLQQFQKEDAALTIYEMLQNIFAIFRQDSSSTGWNETIVENLLANVYHQINHLKTVLEEKLEKEDFTRGKLMSSLHLKRYYGRILHYLKAKEYSHCAWTIVRVEILRNFYFINRLTGYLRN

SEQ ID NO: 1171 - protein, 166 aa, Homo sapiens
MSYNLLGFLQRSSNFQQQKLLWQLNGRLEYCLKDRMNFDIPEEIKQLQQFQKEDAALTIYEMLQNIFAIFRQDSSSTGWNETIVENLLANVYHQINHLKTVLEEKLEKEDFTRGKLMSSLHLKRYYGRILHYLKAKEYSHCAWTIVRVEILRNFYFINRLTGYLRN

SEQ ID NO: 1172 - protein, 166 aa, Homo sapiens
MSYNLLGFLQRSSNFQRQKLLWQLNGRLEYCLKDRMNFDIPEEIKQLQQFQKEDAALTIYEMLQNIFAIFRQDSSSTGWNETIVENLLANVYHQINHLKTVLEEKLEKEDFTRGKLMSSLHLKRYYGRILHYLKAKEYSHCAWTIVRVEILRNFYFINRLTGYLRN

SEQ ID NO: 1173 - protein, 166 aa, Homo sapiens
MSYNLLGFLQRSSNFQSQKLLWQLNGRLEYCLKDRMNFDIPEEIKQLQQFQKEDAALTIYEMLQNIFAIFRQDSSSTGWNETIVENLLANVYHQINHLKTVLEEKLEKEDFTRGKLMSSLHLKRYYGRILHYLKAKEYSHCAWTIVRVEILRNFYFINRLTGYLRN

SEQ ID NO: 1174 - protein, 166 aa, Homo sapiens
MSYNLLGFLQRSSNFQTQKLLWQLNGRLEYCLKDRMNFDIPEEIKQLQQFQKEDAALTIYEMLQNIFAIFRQDSSSTGWNETIVENLLANVYHQINHLKTVLEEKLEKEDFTRGKLMSSLHLKRYYGRILHYLKAKEYSHCAWTIVRVEILRNFYFINRLTGYLRN

SEQ ID NO: 1175 - protein, 166 aa, Homo sapiens
MSYNLLGFLQRSSNFQCQKNLWQLNGRLEYCLKDRMNFDIPEEIKQLQQFQKEDAALTIYEMLQNIFAIFRQDSSSTGWNETIVENLLANVYHQINHLKTVLEEKLEKEDFTRGKLMSSLHLKRYYGRILHYLKAKEYSHCAWTIVRVEILRNFYFINRLTGYLRN

SEQ ID NO: 1176 - protein, 166 aa, Homo sapiens
MSYNLLGFLQRSSNFQCQKQLWQLNGRLEYCLKDRMNFDIPEEIKQLQQFQKEDAALTIYEMLQNIFAIFRQDSSSTGWNETIVENLLANVYHQINHLKTVLEEKLEKEDFTRGKLMSSLHLKRYYGRILHYLKAKEYSHCAWTIVRVEILRNFYFINRLTGYLRN

SEQ ID NO: 1177 - protein, 166 aa, Homo sapiens
MSYNLLGFLQRSSNFQCQKRLWQLNGRLEYCLKDRMNFDIPEEIKQLQQFQKEDAALTIYEMLQNIFAIFRQDSSSTGWNETIVENLLANVYHQINHLKTVLEEKLEKEDFTRGKLMSSLHLKRYYGRILHYLKAKEYSHCAWTIVRVEILRNFYFINRLTGYLRN

SEQ ID NO: 1178 - protein, 166 aa, Homo sapiens
MSYNLLGFLQRSSNFQCQKSLWQLNGRLEYCLKDRMNFDIPEEIKQLQQFQKEDAALTIYEMLQNIFAIFRQDSSSTGWNETIVENLLANVYHQINHLKTVLEEKLEKEDFTRGKLMSSLHLKRYYGRILHYLKAKEYSHCAWTIVRVEILRNFYFINRLTGYLRN

SEQ ID NO: 1179 - protein, 166 aa, Homo sapiens
MSYNLLGFLQRSSNFQCQKTLWQLNGRLEYCLKDRMNFDIPEEIKQLQQFQKEDAALTIYEMLQNIFAIFRQDSSSTGWNETIVENLLANVYHQINHLKTVLEEKLEKEDFTRGKLMSSLHLKRYYGRILHYLKAKEYSHCAWTIVRVEILRNFYFINRLTGYLRN

SEQ ID NO: 1180 - protein, 166 aa, Homo sapiens
MSYNLLGFLQRSSNFQCQKDLWQLNGRLEYCLKDRMNFDIPEEIKQLQQFQKEDAALTIYEMLQNIFAIFRQDSSSTGWNETIVENLLANVYHQINHLKTVLEEKLEKEDFTRGKLMSSLHLKRYYGRILHYLKAKEYSHCAWTIVRVEILRNFYFINRLTGYLRN

SEQ ID NO: 1181 - protein, 166 aa, Homo sapiens
MSYNLLGFLQRSSNFQCQKELWQLNGRLEYCLKDRMNFDIPEEIKQLQQFQKEDAALTIYEMLQNIFAIFRQDSSSTGWNETIVENLLANVYHQINHLKTVLEEKLEKEDFTRGKLMSSLHLKRYYGRILHYLKAKEYSHCAWTIVRVEILRNFYFINRLTGYLRN

SEQ ID NO: 1182 - protein, 166 aa, Homo sapiens
MSYNLLGFLQRSSNFQCQKKLWQLNGRLEYCLKDRMNFDIPEEIKQLQQFQKEDAALTIYEMLQNIFAIFRQDSSSTGWNETIVENLLANVYHQINHLKTVLEEKLEKEDFTRGKLMSSLHLKRYYGRILHYLKAKEYSHCAWTIVRVEILRNFYFINRLTGYLRN

SEQ ID NO: 1183 - protein, 166 aa, Homo sapiens
MSYNLLGFLQRSSNFQCQKLLDQLNGRLEYCLKDRMNFDIPEEIKQLQQFQKEDAALTIYEMLQNIFAIFRQDSSSTGWNETIVENLLANVYHQINHLKTVLEEKLEKEDFTRGKLMSSLHLKRYYGRILHYLKAKEYSHCAWTIVRVEILRNFYFINRLTGYLRN

SEQ ID NO: 1184 - protein, 166 aa, Homo sapiens
MSYNLLGFLQRSSNFQCQKLLEQLNGRLEYCLKDRMNFDIPEEIKQLQQFQKEDAALTIYEMLQNIFAIFRQDSSSTGWNETIVENLLANVYHQINHLKTVLEEKLEKEDFTRGKLMSSLHLKRYYGRILHYLKAKEYSHCAWTIVRVEILRNFYFINRLTGYLRN

SEQ ID NO: 1185 - protein, 166 aa, Homo sapiens
MSYNLLGFLQRSSNFQCQKLLKQLNGRLEYCLKDRMNFDIPEEIKQLQQFQKEDAALTIYEMLQNIFAIFRQDSSSTGWNETIVENLLANVYHQINHLKTVLEEKLEKEDFTRGKLMSSLHLKRYYGRILHYLKAKEYSHCAWTIVRVEILRNFYFINRLTGYLRN

SEQ ID NO: 1186 - protein, 166 aa, Homo sapiens
MSYNLLGFLQRSSNFQCQKLLRQLNGRLEYCLKDRMNFDIPEEIKQLQQFQKEDAALTIYEMLQNIFAIFRQDSSSTGWNETIVENLLANVYHQINHLKTVLEEKLEKEDFTRGKLMSSLHLKRYYGRILHYLKAKEYSHCAWTIVRVEILRNFYFINRLTGYLRN

SEQ ID NO: 1187 - protein, 166 aa, Homo sapiens
MSYNLLGFLQRSSNFQCQKLLWDLNGRLEYCLKDRMNFDIPEEIKQLQQFQKEDAALTIYEMLQNIFAIFRQDSSSTGWNETIVENLLANVYHQINHLKTVLEEKLEKEDFTRGKLMSSLHLKRYYGRILHYLKAKEYSHCAWTIVRVEILRNFYFINRLTGYLRN

SEQ ID NO: 1188 - protein, 166 aa, Homo sapiens
MSYNLLGFLQRSSNFQCQKLLWELNGRLEYCLKDRMNFDIPEEIKQLQQFQKEDAALTIYEMLQNIFAIFRQDSSSTGWNETIVENLLANVYHQINHLKTVLEEKLEKEDFTRGKLMSSLHLKRYYGRILHYLKAKEYSHCAWTIVRVEILRNFYFINRLTGYLRN

SEQ ID NO: 1189 - protein, 166 aa, Homo sapiens
MSYNLLGFLQRSSNFQCQKLLWKLNGRLEYCLKDRMNFDIPEEIKQLQQFQKEDAALTIYEMLQNIFAIFRQDSSSTGWNETIVENLLANVYHQINHLKTVLEEKLEKEDFTRGKLMSSLHLKRYYGRILHYLKAKEYSHCAWTIVRVEILRNFYFINRLTGYLRN

SEQ ID NO: 1190 - protein, 166 aa, Homo sapiens
MSYNLLGFLQRSSNFQCQKLLWRLNGRLEYCLKDRMNFDIPEEIKQLQQFQKEDAALTIYEMLQNIFAIFRQDSSSTGWNETIVENLLANVYHQINHLKTVLEEKLEKEDFTRGKLMSSLHLKRYYGRILHYLKAKEYSHCAWTIVRVEILRNFYFINRLTGYLRN

SEQ ID NO: 1191 - protein, 166 aa, Homo sapiens
MSYNLLGFLQRSSNFQCQKLLWQDNGRLEYCLKDRMNFDIPEEIKQLQQFQKEDAALTIYEMLQNIFAIFRQDSSSTGWNETIVENLLANVYHQINHLKTVLEEKLEKEDFTRGKLMSSLHLKRYYGRILHYLKAKEYSHCAWTIVRVEILRNFYFINRLTGYLRN

SEQ ID NO: 1192 - protein, 166 aa, Homo sapiens
MSYNLLGFLQRSSNFQCQKLLWQENGRLEYCLKDRMNFDIPEEIKQLQQFQKEDAALTIYEMLQNIFAIFRQDSSSTGWNETIVENLLANVYHQINHLKTVLEEKLEKEDFTRGKLMSSLHLKRYYGRILHYLKAKEYSHCAWTIVRVEILRNFYFINRLTGYLRN

SEQ ID NO: 1193 - protein, 166 aa, Homo sapiens
MSYNLLGFLQRSSNFQCQKLLWQKNGRLEYCLKDRMNFDIPEEIKQLQQFQKEDAALTIYEMLQNIFAIFRQDSSSTGWNETIVENLLANVYHQINHLKTVLEEKLEKEDFTRGKLMSSLHLKRYYGRILHYLKAKEYSHCAWTIVRVEILRNFYFINRLTGYLRN

SEQ ID NO: 1194 - protein, 166 aa, Homo sapiens
MSYNLLGFLQRSSNFQCQKLLWQRNGRLEYCLKDRMNFDIPEEIKQLQQFQKEDAALTIYEMLQNIFAIFRQDSSSTGWNETIVENLLANVYHQINHLKTVLEEKLEKEDFTRGKLMSSLHLKRYYGRILHYLKAKEYSHCAWTIVRVEILRNFYFINRLTGYLRN

SEQ ID NO: 1195 - protein, 166 aa, Homo sapiens
MSYNLLGFLQRSSNFQCQKLLWQLNGRLEYCLKDRMNFDIPEEIKQLQQFQKEDAALTIYEMLQNIFAIFRQDSSSTDWNETIVENLLANVYHQINHLKTVLEEKLEKEDFTRGKLMSSLHLKRYYGRILHYLKAKEYSHCAWTIVRVEILRNFYFINRLTGYLRN

SEQ ID NO: 1196 - protein, 166 aa, Homo sapiens
MSYNLLGFLQRSSNFQCQKLLWQLNGRLEYCLKDRMNFDIPEEIKQLQQFQKEDAALTIYEMLQNIFAIFRQDSSSTEWNETIVENLLANVYHQINHLKTVLEEKLEKEDFTRGKLMSSLHLKRYYGRILHYLKAKEYSHCAWTIVRVEILRNFYFINRLTGYLRN

SEQ ID NO: 1197 - protein, 166 aa, Homo sapiens
MSYNLLGFLQRSSNFQCQKLLWQLNGRLEYCLKDRMNFDIPEEIKQLQQFQKEDAALTIYEMLQNIFAIFRQDSSSTKWNETIVENLLANVYHQINHLKTVLEEKLEKEDFTRGKLMSSLHLKRYYGRILHYLKAKEYSHCAWTIVRVEILRNFYFINRLTGYLRN

SEQ ID NO: 1198 - protein, 166 aa, Homo sapiens
MSYNLLGFLQRSSNFQCQKLLWQLNGRLEYCLKDRMNFDIPEEIKQLQQFQKEDAALTIYEMLQNIFAIFRQDSSSTRWNETIVENLLANVYHQINHLKTVLEEKLEKEDFTRGKLMSSLHLKRYYGRILHYLKAKEYSHCAWTIVRVEILRNFYFINRLTGYLRN

SEQ ID NO: 1199 - protein, 166 aa, Homo sapiens
MSYNLLGFLQRSSNFQCQKLLWQLNGRLEYCLKDRMNFDIPEEIKQLQQFQKEDAALTIYEMLQNIFAIFRQDSSSTGDNETIVENLLANVYHQINHLKTVLEEKLEKEDFTRGKLMSSLHLKRYYGRILHYLKAKEYSHCAWTIVRVEILRNFYFINRLTGYLRN

SEQ ID NO: 1200 - protein, 166 aa, Homo sapiens
MSYNLLGFLQRSSNFQCQKLLWQLNGRLEYCLKDRMNFDIPEEIKQLQQFQKEDAALTIYEMLQNIFAIFRQDSSSTGENETIVENLLANVYHQINHLKTVLEEKLEKEDFTRGKLMSSLHLKRYYGRILHYLKAKEYSHCAWTIVRVEILRNFYFINRLTGYLRN

SEQ ID NO: 1201 - protein, 166 aa, Homo sapiens
MSYNLLGFLQRSSNFQCQKLLWQLNGRLEYCLKDRMNFDIPEEIKQLQQFQKEDAALTIYEMLQNIFAIFRQDSSSTGKNETIVENLLANVYHQINHLKTVLEEKLEKEDFTRGKLMSSLHLKRYYGRILHYLKAKEYSHCAWTIVRVEILRNFYFINRLTGYLRN

SEQ ID NO: 1202 - protein, 166 aa, Homo sapiens
MSYNLLGFLQRSSNFQCQKLLWQLNGRLEYCLKDRMNFDIPEEIKQLQQFQKEDAALTIYEMLQNIFAIFRQDSSSTGRNETIVENLLANVYHQINHLKTVLEEKLEKEDFTRGKLMSSLHLKRYYGRILHYLKAKEYSHCAWTIVRVEILRNFYFINRLTGYLRN

SEQ ID NO: 1203 - protein, 166 aa, Homo sapiens
MSYNLLGFLQRSSNFQCQKLLWQLNGRLEYCLKDRMNFDIPEEIKQLQQFQKEDAALTIYEMLQNIFAIFRQDSSSTGWDETIVENLLANVYHQINHLKTVLEEKLEKEDFTRGKLMSSLHLKRYYGRILHYLKAKEYSHCAWTIVRVEILRNFYFINRLTGYLRN

SEQ ID NO: 1204 - protein, 166 aa, Homo sapiens
MSYNLLGFLQRSSNFQCQKLLWQLNGRLEYCLKDRMNFDIPEEIKQLQQFQKEDAALTIYEMLQNIFAIFRQDSSSTGWEETIVENLLANVYHQINHLKTVLEEKLEKEDFTRGKLMSSLHLKRYYGRILHYLKAKEYSHCAWTIVRVEILRNFYFINRLTGYLRN

SEQ ID NO: 1205 - protein, 166 aa, Homo sapiens
MSYNLLGFLQRSSNFQCQKLLWQLNGRLEYCLKDRMNFDIPEEIKQLQQFQKEDAALTIYEMLQNIFAIFRQDSSSTGWKETIVENLLANVYHQINHLKTVLEEKLEKEDFTRGKLMSSLHLKRYYGRILHYLKAKEYSHCAWTIVRVEILRNFYFINRLTGYLRN

SEQ ID NO: 1206 - protein, 166 aa, Homo sapiens
MSYNLLGFLQRSSNFQCQKLLWQLNGRLEYCLKDRMNFDIPEEIKQLQQFQKEDAALTIYEMLQNIFAIFRQDSSSTGWRETIVENLLANVYHQINHLKTVLEEKLEKEDFTRGKLMSSLHLKRYYGRILHYLKAKEYSHCAWTIVRVEILRNFYFINRLTGYLRN

SEQ ID NO: 1207 - protein, 166 aa, Homo sapiens
MSYNLLGFLQRSSNFQCQKLLWQLNGRLEYCLKDRMNFDIPEEIKQLQQFQKEDAALTIYEMLQNIFAIFRQDSSSTGWNEDIVENLLANVYHQINHLKTVLEEKLEKEDFTRGKLMSSLHLKRYYGRILHYLKAKEYSHCAWTIVRVEILRNFYFINRLTGYLRN

SEQ ID NO: 1208 - protein, 166 aa, Homo sapiens
MSYNLLGFLQRSSNFQCQKLLWQLNGRLEYCLKDRMNFDIPEEIKQLQQFQKEDAALTIYEMLQNIFAIFRQDSSSTGWNEEIVENLLANVYHQINHLKTVLEEKLEKEDFTRGKLMSSLHLKRYYGRILHYLKAKEYSHCAWTIVRVEILRNFYFINRLTGYLRN

SEQ ID NO: 1209 - protein, 166 aa, Homo sapiens
MSYNLLGFLQRSSNFQCQKLLWQLNGRLEYCLKDRMNFDIPEEIKQLQQFQKEDAALTIYEMLQNIFAIFRQDSSSTGWNEKIVENLLANVYHQINHLKTVLEEKLEKEDFTRGKLMSSLHLKRYYGRILHYLKAKEYSHCAWTIVRVEILRNFYFINRLTGYLRN

SEQ ID NO: 1210 - protein, 166 aa, Homo sapiens
MSYNLLGFLQRSSNFQCQKLLWQLNGRLEYCLKDRMNFDIPEEIKQLQQFQKEDAALTIYEMLQNIFAIFRQDSSSTGWNERIVENLLANVYHQINHLKTVLEEKLEKEDFTRGKLMSSLHLKRYYGRILHYLKAKEYSHCAWTIVRVEILRNFYFINRLTGYLRN

SEQ ID NO: 1211 - protein, 166 aa, Homo sapiens
MSYNLLGFLQRSSNFQCQKLLWQLNGRLEYCLKDRMNFDIPEEIKQLQQFQKEDAALTIYEMLQNIFAIFRQDSSSTGWNETDVENLLANVYHQINHLKTVLEEKLEKEDFTRGKLMSSLHLKRYYGRILHYLKAKEYSHCAWTIVRVEILRNFYFINRLTGYLRN

SEQ ID NO: 1212 - protein, 166 aa, Homo sapiens
MSYNLLGFLQRSSNFQCQKLLWQLNGRLEYCLKDRMNFDIPEEIKQLQQFQKEDAALTIYEMLQNIFAIFRQDSSSTGWNETEVENLLANVYHQINHLKTVLEEKLEKEDFTRGKLMSSLHLKRYYGRILHYLKAKEYSHCAWTIVRVEILRNFYFINRLTGYLRN

SEQ ID NO: 1213 - protein, 166 aa, Homo sapiens
MSYNLLGFLQRSSNFQCQKLLWQLNGRLEYCLKDRMNFDIPEEIKQLQQFQKEDAALTIYEMLQNIFAIFRQDSSSTGWNETKVENLLANVYHQINHLKTVLEEKLEKEDFTRGKLMSSLHLKRYYGRILHYLKAKEYSHCAWTIVRVEILRNFYFINRLTGYLRN

SEQ ID NO: 1214 - protein, 166 aa, Homo sapiens
MSYNLLGFLQRSSNFQCQKLLWQLNGRLEYCLKDRMNFDIPEEIKQLQQFQKEDAALTIYEMLQNIFAIFRQDSSSTGWNETRVENLLANVYHQINHLKTVLEEKLEKEDFTRGKLMSSLHLKRYYGRILHYLKAKEYSHCAWTIVRVEILRNFYFINRLTGYLRN

SEQ ID NO: 1215 - protein, 166 aa, Homo sapiens
MSYNLLGFLQRSSNFQCQKLLWQLNGRLEYCLKDRMNFDIPEEIKQLQQFQKEDAALTIYEMLQNIFAIFRQDSSSTGWNETNVENLLANVYHQINHLKTVLEEKLEKEDFTRGKLMSSLHLKRYYGRILHYLKAKEYSHCAWTIVRVEILRNFYFINRLTGYLRN

SEQ ID NO: 1216 - protein, 166 aa, Homo sapiens
MSYNLLGFLQRSSNFQCQKLLWQLNGRLEYCLKDRMNFDIPEEIKQLQQFQKEDAALTIYEMLQNIFAIFRQDSSSTGWNETQVENLLANVYHQINHLKTVLEEKLEKEDFTRGKLMSSLHLKRYYGRILHYLKAKEYSHCAWTIVRVEILRNFYFINRLTGYLRN

SEQ ID NO: 1217 - protein, 166 aa, Homo sapiens
MSYNLLGFLQRSSNFQCQKLLWQLNGRLEYCLKDRMNFDIPEEIKQLQQFQKEDAALTIYEMLQNIFAIFRQDSSSTGWNETSVENLLANVYHQINHLKTVLEEKLEKEDFTRGKLMSSLHLKRYYGRILHYLKAKEYSHCAWTIVRVEILRNFYFINRLTGYLRN

SEQ ID NO: 1218 - protein, 166 aa, Homo sapiens
MSYNLLGFLQRSSNFQCQKLLWQLNGRLEYCLKDRMNFDIPEEIKQLQQFQKEDAALTIYEMLQNIFAIFRQDSSSTGWNETTVENLLANVYHQINHLKTVLEEKLEKEDFTRGKLMSSLHLKRYYGRILHYLKAKEYSHCAWTIVRVEILRNFYFINRLTGYLRN

SEQ ID NO: 1219 - protein, 166 aa, Homo sapiens
MSYNLLGFLQRSSNFQCQKLLWQLNGRLEYCLKDRMNFDIPEEIKQLQQFQKEDAALTIYEMLQNIFAIFRQDSSSTGWNETIVEDLLANVYHQINHLKTVLEEKLEKEDFTRGKLMSSLHLKRYYGRILHYLKAKEYSHCAWTIVRVEILRNFYFINRLTGYLRN

SEQ ID NO: 1220 - protein, 166 aa, Homo sapiens
MSYNLLGFLQRSSNFQCQKLLWQLNGRLEYCLKDRMNFDIPEEIKQLQQFQKEDAALTIYEMLQNIFAIFRQDSSSTGWNETIVEELLANVYHQINHLKTVLEEKLEKEDFTRGKLMSSLHLKRYYGRILHYLKAKEYSHCAWTIVRVEILRNFYFINRLTGYLRN

SEQ ID NO: 1221 - protein, 166 aa, Homo sapiens
MSYNLLGFLQRSSNFQCQKLLWQLNGRLEYCLKDRMNFDIPEEIKQLQQFQKEDAALTIYEMLQNIFAIFRQDSSSTGWNETIVEKLLANVYHQINHLKTVLEEKLEKEDFTRGKLMSSLHLKRYYGRILHYLKAKEYSHCAWTIVRVEILRNFYFINRLTGYLRN

SEQ ID NO: 1222 - protein, 166 aa, Homo sapiens
MSYNLLGFLQRSSNFQCQKLLWQLNGRLEYCLKDRMNFDIPEEIKQLQQFQKEDAALTIYEMLQNIFAIFRQDSSSTGWNETIVERLLANVYHQINHLKTVLEEKLEKEDFTRGKLMSSLHLKRYYGRILHYLKAKEYSHCAWTIVRVEILRNFYFINRLTGYLRN

SEQ ID NO: 1223 - protein, 166 aa, Homo sapiens
MSYNLLGFLQRSSNFQCQKLLWQLNGRLEYCLKDRMNFDIPEEIKQLQQFQKEDAALTIYEMLQNIFAIFRQDSSSTGWNETIVEQLLANVYHQINHLKTVLEEKLEKEDFTRGKLMSSLHLKRYYGRILHYLKAKEYSHCAWTIVRVEILRNFYFINRLTGYLRN

SEQ ID NO: 1224 - protein, 166 aa, Homo sapiens
MSYNLLGFLQRSSNFQCQKLLWQLNGRLEYCLKDRMNFDIPEEIKQLQQFQKEDAALTIYEMLQNIFAIFRQDSSSTGWNETIVESLLANVYHQINHLKTVLEEKLEKEDFTRGKLMSSLHLKRYYGRILHYLKAKEYSHCAWTIVRVEILRNFYFINRLTGYLRN

SEQ ID NO: 1225 - protein, 166 aa, Homo sapiens
MSYNLLGFLQRSSNFQCQKLLWQLNGRLEYCLKDRMNFDIPEEIKQLQQFQKEDAALTIYEMLQNIFAIFRQDSSSTGWNETIVETLLANVYHQINHLKTVLEEKLEKEDFTRGKLMSSLHLKRYYGRILHYLKAKEYSHCAWTIVRVEILRNFYFINRLTGYLRN

SEQ ID NO: 1226 - protein, 166 aa, Homo sapiens
MSYNLLGFLQRSSNFQCQKLLWQLNGRLEYCLKDRMNFDIPEEIKQLQQFQKEDAALTIYEMLQNIFAIFRQDSSSTGWNETIVENDLANVYHQINHLKTVLEEKLEKEDFTRGKLMSSLHLKRYYGRILHYLKAKEYSHCAWTIVRVEILRNFYFINRLTGYLRN

SEQ ID NO: 1227 - protein, 166 aa, Homo sapiens
MSYNLLGFLQRSSNFQCQKLLWQLNGRLEYCLKDRMNFDIPEEIKQLQQFQKEDAALTIYEMLQNIFAIFRQDSSSTGWNETIVENELANVYHQINHLKTVLEEKLEKEDFTRGKLMSSLHLKRYYGRILHYLKAKEYSHCAWTIVRVEILRNFYFINRLTGYLRN

SEQ ID NO: 1228 - protein, 166 aa, Homo sapiens
MSYNLLGFLQRSSNFQCQKLLWQLNGRLEYCLKDRMNFDIPEEIKQLQQFQKEDAALTIYEMLQNIFAIFRQDSSSTGWNETIVENKLANVYHQINHLKTVLEEKLEKEDFTRGKLMSSLHLKRYYGRILHYLKAKEYSHCAWTIVRVEILRNFYFINRLTGYLRN

SEQ ID NO: 1229 - protein, 166 aa, Homo sapiens
MSYNLLGFLQRSSNFQCQKLLWQLNGRLEYCLKDRMNFDIPEEIKQLQQFQKEDAALTIYEMLQNIFAIFRQDSSSTGWNETIVENRLANVYHQINHLKTVLEEKLEKEDFTRGKLMSSLHLKRYYGRILHYLKAKEYSHCAWTIVRVEILRNFYFINRLTGYLRN

SEQ ID NO: 1230 - protein, 166 aa, Homo sapiens
MSYNLLGFLQRSSNFQCQKLLWQLNGRLEYCLKDRMNFDIPEEIKQLQQFQKEDAALTIYEMLQNIFAIFRQDSSSTGWNETIVENNLANVYHQINHLKTVLEEKLEKEDFTRGKLMSSLHLKRYYGRILHYLKAKEYSHCAWTIVRVEILRNFYFINRLTGYLRN

SEQ ID NO: 1231 - protein, 166 aa, Homo sapiens
MSYNLLGFLQRSSNFQCQKLLWQLNGRLEYCLKDRMNFDIPEEIKQLQQFQKEDAALTIYEMLQNIFAIFRQDSSSTGWNETIVENQLANVYHQINHLKTVLEEKLEKEDFTRGKLMSSLHLKRYYGRILHYLKAKEYSHCAWTIVRVEILRNFYFINRLTGYLRN

SEQ ID NO: 1232 - protein, 166 aa, Homo sapiens
MSYNLLGFLQRSSNFQCQKLLWQLNGRLEYCLKDRMNFDIPEEIKQLQQFQKEDAALTIYEMLQNIFAIFRQDSSSTGWNETIVENSLANVYHQINHLKTVLEEKLEKEDFTRGKLMSSLHLKRYYGRILHYLKAKEYSHCAWTIVRVEILRNFYFINRLTGYLRN

SEQ ID NO: 1233 - protein, 166 aa, Homo sapiens
MSYNLLGFLQRSSNFQCQKLLWQLNGRLEYCLKDRMNFDIPEEIKQLQQFQKEDAALTIYEMLQNIFAIFRQDSSSTGWNETIVENTLANVYHQINHLKTVLEEKLEKEDFTRGKLMSSLHLKRYYGRILHYLKAKEYSHCAWTIVRVEILRNFYFINRLTGYLRN

SEQ ID NO: 1234 - protein, 166 aa, Homo sapiens
MSYNLLGFLQRSSNFQCQKLLWQLNGRLEYCLKDRMNFDIPEEIKQLQQFQKEDAALTIYEMLQNIFAIFRQDSSSTGWNETIVENLLDNVYHQINHLKTVLEEKLEKEDFTRGKLMSSLHLKRYYGRILHYLKAKEYSHCAWTIVRVEILRNFYFINRLTGYLRN

SEQ ID NO: 1235 - protein, 166 aa, Homo sapiens
MSYNLLGFLQRSSNFQCQKLLWQLNGRLEYCLKDRMNFDIPEEIKQLQQFQKEDAALTIYEMLQNIFAIFRQDSSSTGWNETIVENLLENVYHQINHLKTVLEEKLEKEDFTRGKLMSSLHLKRYYGRILHYLKAKEYSHCAWTIVRVEILRNFYFINRLTGYLRN

SEQ ID NO: 1236 - protein, 166 aa, Homo sapiens
MSYNLLGFLQRSSNFQCQKLLWQLNGRLEYCLKDRMNFDIPEEIKQLQQFQKEDAALTIYEMLQNIFAIFRQDSSSTGWNETIVENLLKNVYHQINHLKTVLEEKLEKEDFTRGKLMSSLHLKRYYGRILHYLKAKEYSHCAWTIVRVEILRNFYFINRLTGYLRN

SEQ ID NO: 1237 - protein, 166 aa, Homo sapiens
MSYNLLGFLQRSSNFQCQKLLWQLNGRLEYCLKDRMNFDIPEEIKQLQQFQKEDAALTIYEMLQNIFAIFRQDSSSTGWNETIVENLLRNVYHQINHLKTVLEEKLEKEDFTRGKLMSSLHLKRYYGRILHYLKAKEYSHCAWTIVRVEILRNFYFINRLTGYLRN

SEQ ID NO: 1238 - protein, 166 aa, Homo sapiens
MSYNLLGFLQRSSNFQCQKLLWQLNGRLEYCLKDRMNFDIPEEIKQLQQFQKEDAALTIYEMLQNIFAIFRQDSSSTGWNETIVENLLADVYHQINHLKTVLEEKLEKEDFTRGKLMSSLHLKRYYGRILHYLKAKEYSHCAWTIVRVEILRNFYFINRLTGYLRN

SEQ ID NO: 1239 - protein, 166 aa, Homo sapiens
MSYNLLGFLQRSSNFQCQKLLWQLNGRLEYCLKDRMNFDIPEEIKQLQQFQKEDAALTIYEMLQNIFAIFRQDSSSTGWNETIVENLLAEVYHQINHLKTVLEEKLEKEDFTRGKLMSSLHLKRYYGRILHYLKAKEYSHCAWTIVRVEILRNFYFINRLTGYLRN

SEQ ID NO: 1240 - protein, 166 aa, Homo sapiens
MSYNLLGFLQRSSNFQCQKLLWQLNGRLEYCLKDRMNFDIPEEIKQLQQFQKEDAALTIYEMLQNIFAIFRQDSSSTGWNETIVENLLAKVYHQINHLKTVLEEKLEKEDFTRGKLMSSLHLKRYYGRILHYLKAKEYSHCAWTIVRVEILRNFYFINRLTGYLRN

SEQ ID NO: 1241 - protein, 166 aa, Homo sapiens
MSYNLLGFLQRSSNFQCQKLLWQLNGRLEYCLKDRMNFDIPEEIKQLQQFQKEDAALTIYEMLQNIFAIFRQDSSSTGWNETIVENLLAQVYHQINHLKTVLEEKLEKEDFTRGKLMSSLHLKRYYGRILHYLKAKEYSHCAWTIVRVEILRNFYFINRLTGYLRN

SEQ ID NO: 1242 - protein, 166 aa, Homo sapiens
MSYNLLGFLQRSSNFQCQKLLWQLNGRLEYCLKDRMNFDIPEEIKQLQQFQKEDAALTIYEMLQNIFAIFRQDSSSTGWNETIVENLLARVYHQINHLKTVLEEKLEKEDFTRGKLMSSLHLKRYYGRILHYLKAKEYSHCAWTIVRVEILRNFYFINRLTGYLRN

SEQ ID NO: 1243 - protein, 166 aa, Homo sapiens
MSYNLLGFLQRSSNFQCQKLLWQLNGRLEYCLKDRMNFDIPEEIKQLQQFQKEDAALTIYEMLQNIFAIFRQDSSSTGWNETIVENLLASVYHQINHLKTVLEEKLEKEDFTRGKLMSSLHLKRYYGRILHYLKAKEYSHCAWTIVRVEILRNFYFINRLTGYLRN

SEQ ID NO: 1244 - protein, 166 aa, Homo sapiens
MSYNLLGFLQRSSNFQCQKLLWQLNGRLEYCLKDRMNFDIPEEIKQLQQFQKEDAALTIYEMLQNIFAIFRQDSSSTGWNETIVENLLATVYHQINHLKTVLEEKLEKEDFTRGKLMSSLHLKRYYGRILHYLKAKEYSHCAWTIVRVEILRNFYFINRLTGYLRN

SEQ ID NO: 1245 - protein, 166 aa, Homo sapiens
MSYNLLGFLQRSSNFQCQKLLWQLNGRLEYCLKDRMNFDIPEEIKQLQQFQKEDAALTIYEMLQNIFAIFRQDSSSTGWNETIVENLLANDYHQINHLKTVLEEKLEKEDFTRGKLMSSLHLKRYYGRILHYLKAKEYSHCAWTIVRVEILRNFYFINRLTGYLRN

SEQ ID NO: 1246 - protein, 166 aa, Homo sapiens
MSYNLLGFLQRSSNFQCQKLLWQLNGRLEYCLKDRMNFDIPEEIKQLQQFQKEDAALTIYEMLQNIFAIFRQDSSSTGWNETIVENLLANEYHQINHLKTVLEEKLEKEDFTRGKLMSSLHLKRYYGRILHYLKAKEYSHCAWTIVRVEILRNFYFINRLTGYLRN

SEQ ID NO: 1247 - protein, 166 aa, Homo sapiens
MSYNLLGFLQRSSNFQCQKLLWQLNGRLEYCLKDRMNFDIPEEIKQLQQFQKEDAALTIYEMLQNIFAIFRQDSSSTGWNETIVENLLANKYHQINHLKTVLEEKLEKEDFTRGKLMSSLHLKRYYGRILHYLKAKEYSHCAWTIVRVEILRNFYFINRLTGYLRN

SEQ ID NO: 1248 - protein, 166 aa, Homo sapiens
MSYNLLGFLQRSSNFQCQKLLWQLNGRLEYCLKDRMNFDIPEEIKQLQQFQKEDAALTIYEMLQNIFAIFRQDSSSTGWNETIVENLLANNYHQINHLKTVLEEKLEKEDFTRGKLMSSLHLKRYYGRILHYLKAKEYSHCAWTIVRVEILRNFYFINRLTGYLRN

SEQ ID NO: 1249 - protein, 166 aa, Homo sapiens
MSYNLLGFLQRSSNFQCQKLLWQLNGRLEYCLKDRMNFDIPEEIKQLQQFQKEDAALTIYEMLQNIFAIFRQDSSSTGWNETIVENLLANQYHQINHLKTVLEEKLEKEDFTRGKLMSSLHLKRYYGRILHYLKAKEYSHCAWTIVRVEILRNFYFINRLTGYLRN

SEQ ID NO: 1250 - protein, 166 aa, Homo sapiens
MSYNLLGFLQRSSNFQCQKLLWQLNGRLEYCLKDRMNFDIPEEIKQLQQFQKEDAALTIYEMLQNIFAIFRQDSSSTGWNETIVENLLANRYHQINHLKTVLEEKLEKEDFTRGKLMSSLHLKRYYGRILHYLKAKEYSHCAWTIVRVEILRNFYFINRLTGYLRN

SEQ ID NO: 1251 - protein, 166 aa, Homo sapiens
MSYNLLGFLQRSSNFQCQKLLWQLNGRLEYCLKDRMNFDIPEEIKQLQQFQKEDAALTIYEMLQNIFAIFRQDSSSTGWNETIVENLLANSYHQINHLKTVLEEKLEKEDFTRGKLMSSLHLKRYYGRILHYLKAKEYSHCAWTIVRVEILRNFYFINRLTGYLRN

SEQ ID NO: 1252 - protein, 166 aa, Homo sapiens
MSYNLLGFLQRSSNFQCQKLLWQLNGRLEYCLKDRMNFDIPEEIKQLQQFQKEDAALTIYEMLQNIFAIFRQDSSSTGWNETIVENLLANTYHQINHLKTVLEEKLEKEDFTRGKLMSSLHLKRYYGRILHYLKAKEYSHCAWTIVRVEILRNFYFINRLTGYLRN

SEQ ID NO: 1253 - protein, 166 aa, Homo sapiens
MSYNLLGFLQRSSNFQCQKLLWQLNGRLEYCLKDRMNFDIPEEIKQLQQFQKEDAALTIYEMLQNIFAIFRQDSSSTGWNETIVENLLANVYHDINHLKTVLEEKLEKEDFTRGKLMSSLHLKRYYGRILHYLKAKEYSHCAWTIVRVEILRNFYFINRLTGYLRN

SEQ ID NO: 1254 - protein, 166 aa, Homo sapiens
MSYNLLGFLQRSSNFQCQKLLWQLNGRLEYCLKDRMNFDIPEEIKQLQQFQKEDAALTIYEMLQNIFAIFRQDSSSTGWNETIVENLLANVYHEINHLKTVLEEKLEKEDFTRGKLMSSLHLKRYYGRILHYLKAKEYSHCAWTIVRVEILRNFYFINRLTGYLRN

SEQ ID NO: 1255 - protein, 166 aa, Homo sapiens
MSYNLLGFLQRSSNFQCQKLLWQLNGRLEYCLKDRMNFDIPEEIKQLQQFQKEDAALTIYEMLQNIFAIFRQDSSSTGWNETIVENLLANVYHKINHLKTVLEEKLEKEDFTRGKLMSSLHLKRYYGRILHYLKAKEYSHCAWTIVRVEILRNFYFINRLTGYLRN

SEQ ID NO: 1256 - protein, 166 aa, Homo sapiens
MSYNLLGFLQRSSNFQCQKLLWQLNGRLEYCLKDRMNFDIPEEIKQLQQFQKEDAALTIYEMLQNIFAIFRQDSSSTGWNETIVENLLANVYHNINHLKTVLEEKLEKEDFTRGKLMSSLHLKRYYGRILHYLKAKEYSHCAWTIVRVEILRNFYFINRLTGYLRN

SEQ ID NO: 1257 - protein, 166 aa, Homo sapiens
MSYNLLGFLQRSSNFQCQKLLWQLNGRLEYCLKDRMNFDIPEEIKQLQQFQKEDAALTIYEMLQNIFAIFRQDSSSTGWNETIVENLLANVYHRINHLKTVLEEKLEKEDFTRGKLMSSLHLKRYYGRILHYLKAKEYSHCAWTIVRVEILRNFYFINRLTGYLRN

SEQ ID NO: 1258 - protein, 166 aa, Homo sapiens
MSYNLLGFLQRSSNFQCQKLLWQLNGRLEYCLKDRMNFDIPEEIKQLQQFQKEDAALTIYEMLQNIFAIFRQDSSSTGWNETIVENLLANVYHSINHLKTVLEEKLEKEDFTRGKLMSSLHLKRYYGRILHYLKAKEYSHCAWTIVRVEILRNFYFINRLTGYLRN

SEQ ID NO: 1259 - protein, 166 aa, Homo sapiens
MSYNLLGFLQRSSNFQCQKLLWQLNGRLEYCLKDRMNFDIPEEIKQLQQFQKEDAALTIYEMLQNIFAIFRQDSSSTGWNETIVENLLANVYHTINHLKTVLEEKLEKEDFTRGKLMSSLHLKRYYGRILHYLKAKEYSHCAWTIVRVEILRNFYFINRLTGYLRN

SEQ ID NO: 1260 - protein, 166 aa, Homo sapiens
MSYNLLGFLQRSSNFQCQKLLWQLNGRLEYCLKDRMNFDIPEEIKQLQQFQKEDAALTIYEMLQNIFAIFRQDSSSTGWNETIVENLLANVYHQDNHLKTVLEEKLEKEDFTRGKLMSSLHLKRYYGRILHYLKAKEYSHCAWTIVRVEILRNFYFINRLTGYLRN

SEQ ID NO: 1261 - protein, 166 aa, Homo sapiens
MSYNLLGFLQRSSNFQCQKLLWQLNGRLEYCLKDRMNFDIPEEIKQLQQFQKEDAALTIYEMLQNIFAIFRQDSSSTGWNETIVENLLANVYHQENHLKTVLEEKLEKEDFTRGKLMSSLHLKRYYGRILHYLKAKEYSHCAWTIVRVEILRNFYFINRLTGYLRN

SEQ ID NO: 1262 - protein, 166 aa, Homo sapiens
MSYNLLGFLQRSSNFQCQKLLWQLNGRLEYCLKDRMNFDIPEEIKQLQQFQKEDAALTIYEMLQNIFAIFRQDSSSTGWNETIVENLLANVYHQKNHLKTVLEEKLEKEDFTRGKLMSSLHLKRYYGRILHYLKAKEYSHCAWTIVRVEILRNFYFINRLTGYLRN

SEQ ID NO: 1263 - protein, 166 aa, Homo sapiens
MSYNLLGFLQRSSNFQCQKLLWQLNGRLEYCLKDRMNFDIPEEIKQLQQFQKEDAALTIYEMLQNIFAIFRQDSSSTGWNETIVENLLANVYHQNNHLKTVLEEKLEKEDFTRGKLMSSLHLKRYYGRILHYLKAKEYSHCAWTIVRVEILRNFYFINRLTGYLRN

SEQ ID NO: 1264 - protein, 166 aa, Homo sapiens
MSYNLLGFLQRSSNFQCQKLLWQLNGRLEYCLKDRMNFDIPEEIKQLQQFQKEDAALTIYEMLQNIFAIFRQDSSSTGWNETIVENLLANVYHQQNHLKTVLEEKLEKEDFTRGKLMSSLHLKRYYGRILHYLKAKEYSHCAWTIVRVEILRNFYFINRLTGYLRN

SEQ ID NO: 1265 - protein, 166 aa, Homo sapiens
MSYNLLGFLQRSSNFQCQKLLWQLNGRLEYCLKDRMNFDIPEEIKQLQQFQKEDAALTIYEMLQNIFAIFRQDSSSTGWNETIVENLLANVYHQRNHLKTVLEEKLEKEDFTRGKLMSSLHLKRYYGRILHYLKAKEYSHCAWTIVRVEILRNFYFINRLTGYLRN

SEQ ID NO: 1266 - protein, 166 aa, Homo sapiens
MSYNLLGFLQRSSNFQCQKLLWQLNGRLEYCLKDRMNFDIPEEIKQLQQFQKEDAALTIYEMLQNIFAIFRQDSSSTGWNETIVENLLANVYHQSNHLKTVLEEKLEKEDFTRGKLMSSLHLKRYYGRILHYLKAKEYSHCAWTIVRVEILRNFYFINRLTGYLRN

SEQ ID NO: 1267 - protein, 166 aa, Homo sapiens
MSYNLLGFLQRSSNFQCQKLLWQLNGRLEYCLKDRMNFDIPEEIKQLQQFQKEDAALTIYEMLQNIFAIFRQDSSSTGWNETIVENLLANVYHQTNHLKTVLEEKLEKEDFTRGKLMSSLHLKRYYGRILHYLKAKEYSHCAWTIVRVEILRNFYFINRLTGYLRN

SEQ ID NO: 1268 - protein, 166 aa, Homo sapiens
MSYNLLGFLQRSSNFQCQKLLWQLNGRLEYCLKDRMNFDIPEEIKQLQQFQKEDAALTIYEMLQNIFAIFRQDSSSTGWNETIVENLLANVYHQINDLKTVLEEKLEKEDFTRGKLMSSLHLKRYYGRILHYLKAKEYSHCAWTIVRVEILRNFYFINRLTGYLRN

SEQ ID NO: 1269 - protein, 166 aa, Homo sapiens
MSYNLLGFLQRSSNFQCQKLLWQLNGRLEYCLKDRMNFDIPEEIKQLQQFQKEDAALTIYEMLQNIFAIFRQDSSSTGWNETIVENLLANVYHQINELKTVLEEKLEKEDFTRGKLMSSLHLKRYYGRILHYLKAKEYSHCAWTIVRVEILRNFYFINRLTGYLRN

SEQ ID NO: 1270 - protein, 166 aa, Homo sapiens
MSYNLLGFLQRSSNFQCQKLLWQLNGRLEYCLKDRMNFDIPEEIKQLQQFQKEDAALTIYEMLQNIFAIFRQDSSSTGWNETIVENLLANVYHQINKLKTVLEEKLEKEDFTRGKLMSSLHLKRYYGRILHYLKAKEYSHCAWTIVRVEILRNFYFINRLTGYLRN

SEQ ID NO: 1271 - protein, 166 aa, Homo sapiens
MSYNLLGFLQRSSNFQCQKLLWQLNGRLEYCLKDRMNFDIPEEIKQLQQFQKEDAALTIYEMLQNIFAIFRQDSSSTGWNETIVENLLANVYHQINNLKTVLEEKLEKEDFTRGKLMSSLHLKRYYGRILHYLKAKEYSHCAWTIVRVEILRNFYFINRLTGYLRN

SEQ ID NO: 1272 - protein, 166 aa, Homo sapiens
MSYNLLGFLQRSSNFQCQKLLWQLNGRLEYCLKDRMNFDIPEEIKQLQQFQKEDAALTIYEMLQNIFAIFRQDSSSTGWNETIVENLLANVYHQINQLKTVLEEKLEKEDFTRGKLMSSLHLKRYYGRILHYLKAKEYSHCAWTIVRVEILRNFYFINRLTGYLRN

SEQ ID NO: 1273 - protein, 166 aa, Homo sapiens
MSYNLLGFLQRSSNFQCQKLLWQLNGRLEYCLKDRMNFDIPEEIKQLQQFQKEDAALTIYEMLQNIFAIFRQDSSSTGWNETIVENLLANVYHQINRLKTVLEEKLEKEDFTRGKLMSSLHLKRYYGRILHYLKAKEYSHCAWTIVRVEILRNFYFINRLTGYLRN

SEQ ID NO: 1274 - protein, 166 aa, Homo sapiens
MSYNLLGFLQRSSNFQCQKLLWQLNGRLEYCLKDRMNFDIPEEIKQLQQFQKEDAALTIYEMLQNIFAIFRQDSSSTGWNETIVENLLANVYHQINSLKTVLEEKLEKEDFTRGKLMSSLHLKRYYGRILHYLKAKEYSHCAWTIVRVEILRNFYFINRLTGYLRN

SEQ ID NO: 1275 - protein, 166 aa, Homo sapiens
MSYNLLGFLQRSSNFQCQKLLWQLNGRLEYCLKDRMNFDIPEEIKQLQQFQKEDAALTIYEMLQNIFAIFRQDSSSTGWNETIVENLLANVYHQINTLKTVLEEKLEKEDFTRGKLMSSLHLKRYYGRILHYLKAKEYSHCAWTIVRVEILRNFYFINRLTGYLRN

SEQ ID NO: 1276 - protein, 166 aa, Homo sapiens
MSYNLLGFLQRSSNFQCQKLLWQLNGRLEYCLKDRMNFDIPEEIKQLQQFQKEDAALTIYEMLQNIFAIFRQDSSSTGWNETIVENLLANVYHQINHDKTVLEEKLEKEDFTRGKLMSSLHLKRYYGRILHYLKAKEYSHCAWTIVRVEILRNFYFINRLTGYLRN

SEQ ID NO: 1277 - protein, 166 aa, Homo sapiens
MSYNLLGFLQRSSNFQCQKLLWQLNGRLEYCLKDRMNFDIPEEIKQLQQFQKEDAALTIYEMLQNIFAIFRQDSSSTGWNETIVENLLANVYHQINHEKTVLEEKLEKEDFTRGKLMSSLHLKRYYGRILHYLKAKEYSHCAWTIVRVEILRNFYFINRLTGYLRN

SEQ ID NO: 1278 - protein, 166 aa, Homo sapiens
MSYNLLGFLQRSSNFQCQKLLWQLNGRLEYCLKDRMNFDIPEEIKQLQQFQKEDAALTIYEMLQNIFAIFRQDSSSTGWNETIVENLLANVYHQINHKKTVLEEKLEKEDFTRGKLMSSLHLKRYYGRILHYLKAKEYSHCAWTIVRVEILRNFYFINRLTGYLRN

SEQ ID NO: 1279 - protein, 166 aa, Homo sapiens
MSYNLLGFLQRSSNFQCQKLLWQLNGRLEYCLKDRMNFDIPEEIKQLQQFQKEDAALTIYEMLQNIFAIFRQDSSSTGWNETIVENLLANVYHQINHNKTVLEEKLEKEDFTRGKLMSSLHLKRYYGRILHYLKAKEYSHCAWTIVRVEILRNFYFINRLTGYLRN

SEQ ID NO: 1280 - protein, 166 aa, Homo sapiens
MSYNLLGFLQRSSNFQCQKLLWQLNGRLEYCLKDRMNFDIPEEIKQLQQFQKEDAALTIYEMLQNIFAIFRQDSSSTGWNETIVENLLANVYHQINHQKTVLEEKLEKEDFTRGKLMSSLHLKRYYGRILHYLKAKEYSHCAWTIVRVEILRNFYFINRLTGYLRN

SEQ ID NO: 1281 - protein, 166 aa, Homo sapiens
MSYNLLGFLQRSSNFQCQKLLWQLNGRLEYCLKDRMNFDIPEEIKQLQQFQKEDAALTIYEMLQNIFAIFRQDSSSTGWNETIVENLLANVYHQINHRKTVLEEKLEKEDFTRGKLMSSLHLKRYYGRILHYLKAKEYSHCAWTIVRVEILRNFYFINRLTGYLRN

SEQ ID NO: 1282 - protein, 166 aa, Homo sapiens
MSYNLLGFLQRSSNFQCQKLLWQLNGRLEYCLKDRMNFDIPEEIKQLQQFQKEDAALTIYEMLQNIFAIFRQDSSSTGWNETIVENLLANVYHQINHSKTVLEEKLEKEDFTRGKLMSSLHLKRYYGRILHYLKAKEYSHCAWTIVRVEILRNFYFINRLTGYLRN

SEQ ID NO: 1283 - protein, 166 aa, Homo sapiens
MSYNLLGFLQRSSNFQCQKLLWQLNGRLEYCLKDRMNFDIPEEIKQLQQFQKEDAALTIYEMLQNIFAIFRQDSSSTGWNETIVENLLANVYHQINHTKTVLEEKLEKEDFTRGKLMSSLHLKRYYGRILHYLKAKEYSHCAWTIVRVEILRNFYFINRLTGYLRN

SEQ ID NO: 1284 - protein, 166 aa, Homo sapiens
MSYNLLGFLQRSSNFQCQKLLWQLNGRLEYCLKDRMNFDIPEEIKQLQQFQKEDAALTIYEMLQNIFAIFRQDSSSTGWNETIVENLLANVYHQINHLKTDLEEKLEKEDFTRGKLMSSLHLKRYYGRILHYLKAKEYSHCAWTIVRVEILRNFYFINRLTGYLRN

SEQ ID NO: 1285 - protein, 166 aa, Homo sapiens
MSYNLLGFLQRSSNFQCQKLLWQLNGRLEYCLKDRMNFDIPEEIKQLQQFQKEDAALTIYEMLQNIFAIFRQDSSSTGWNETIVENLLANVYHQINHLKTELEEKLEKEDFTRGKLMSSLHLKRYYGRILHYLKAKEYSHCAWTIVRVEILRNFYFINRLTGYLRN

SEQ ID NO: 1286 - protein, 166 aa, Homo sapiens
MSYNLLGFLQRSSNFQCQKLLWQLNGRLEYCLKDRMNFDIPEEIKQLQQFQKEDAALTIYEMLQNIFAIFRQDSSSTGWNETIVENLLANVYHQINHLKTKLEEKLEKEDFTRGKLMSSLHLKRYYGRILHYLKAKEYSHCAWTIVRVEILRNFYFINRLTGYLRN

SEQ ID NO: 1287 - protein, 166 aa, Homo sapiens
MSYNLLGFLQRSSNFQCQKLLWQLNGRLEYCLKDRMNFDIPEEIKQLQQFQKEDAALTIYEMLQNIFAIFRQDSSSTGWNETIVENLLANVYHQINHLKTNLEEKLEKEDFTRGKLMSSLHLKRYYGRILHYLKAKEYSHCAWTIVRVEILRNFYFINRLTGYLRN

SEQ ID NO: 1288 - protein, 166 aa, Homo sapiens
MSYNLLGFLQRSSNFQCQKLLWQLNGRLEYCLKDRMNFDIPEEIKQLQQFQKEDAALTIYEMLQNIFAIFRQDSSSTGWNETIVENLLANVYHQINHLKTQLEEKLEKEDFTRGKLMSSLHLKRYYGRILHYLKAKEYSHCAWTIVRVEILRNFYFINRLTGYLRN

SEQ ID NO: 1289 - protein, 166 aa, Homo sapiens
MSYNLLGFLQRSSNFQCQKLLWQLNGRLEYCLKDRMNFDIPEEIKQLQQFQKEDAALTIYEMLQNIFAIFRQDSSSTGWNETIVENLLANVYHQINHLKTRLEEKLEKEDFTRGKLMSSLHLKRYYGRILHYLKAKEYSHCAWTIVRVEILRNFYFINRLTGYLRN

SEQ ID NO: 1290 - protein, 166 aa, Homo sapiens
MSYNLLGFLQRSSNFQCQKLLWQLNGRLEYCLKDRMNFDIPEEIKQLQQFQKEDAALTIYEMLQNIFAIFRQDSSSTGWNETIVENLLANVYHQINHLKTSLEEKLEKEDFTRGKLMSSLHLKRYYGRILHYLKAKEYSHCAWTIVRVEILRNFYFINRLTGYLRN

SEQ ID NO: 1291 - protein, 166 aa, Homo sapiens
MSYNLLGFLQRSSNFQCQKLLWQLNGRLEYCLKDRMNFDIPEEIKQLQQFQKEDAALTIYEMLQNIFAIFRQDSSSTGWNETIVENLLANVYHQINHLKTTLEEKLEKEDFTRGKLMSSLHLKRYYGRILHYLKAKEYSHCAWTIVRVEILRNFYFINRLTGYLRN

SEQ ID NO: 1292 - protein, 166 aa, Homo sapiens
CSYNLLGFLQRSSNFQCQKLLWQLNGRLEYCLKDRMNFDIPEEIKQLQQFQKEDAALTIYEMLQNIFAIFRQDSSSTGWNETIVENLLANVYHQINHLKTVLEEKLEKEDFTRGKLMSSLHLKRYYGRILHYLKAKEYSHCAWTIVRVEILRNFYFINRLTGYLRN

SEQ ID NO: 1293 - protein, 166 aa, Homo sapiens
MSYNLLGFLQRSSNFQCQKLLWQLNGRLEYCLKDRMNFDIPEEIKQLQQFQKEDAALTIYEMLQNIFAIFRQDSSSTGWNETIVENLLANVYHQINHLKTCLEEKLEKEDFTRGKLMSSLHLKRYYGRILHYLKAKEYSHCAWTIVRVEILRNFYFINRLTGYLRN

SEQ ID NO: 1294 - protein, 166 aa, Homo sapiens
MSYNLCGFLQRSSNFQCQKLLWQLNGRLEYCLKDRMNFDIPEEIKQLQQFQKEDAALTIYEMLQNIFAIFRQDSSSTGWNETIVENLLANVYHQINHLKTVLEEKLEKEDFTRGKLMSSLHLKRYYGRILHYLKAKEYSHCAWTIVRVEILRNFYFINRLTGYLRN

SEQ ID NO: 1295 - protein, 166 aa, Homo sapiens
MSYNLLGFLQRSSNFQCQKLLWQLNGRLEYCLKDRMNFDIPEEIKQLQQFQKEDAALTIYEMLQNIFAIFRQDSSSTGWNETIVENLLANVYHQINHCKTVLEEKLEKEDFTRGKLMSSLHLKRYYGRILHYLKAKEYSHCAWTIVRVEILRNFYFINRLTGYLRN

SEQ ID NO: 1296 - protein, 166 aa, Homo sapiens
MSYNLLGFLCRSSNFQCQKLLWQLNGRLEYCLKDRMNFDIPEEIKQLQQFQKEDAALTIYEMLQNIFAIFRQDSSSTGWNETIVENLLANVYHQINHLKTVLEEKLEKEDFTRGKLMSSLHLKRYYGRILHYLKAKEYSHCAWTIVRVEILRNFYFINRLTGYLRN

SEQ ID NO: 1297 - protein, 166 aa, Homo sapiens
MSYNLLGFLQRSSNFQCQKLLWQLNGRLEYCLKDRMNFDIPEEIKQLQQFQKEDAALTIYEMLQNIFAIFRQDSSSTGWNETIVENLLANVYHQINCLKTVLEEKLEKEDFTRGKLMSSLHLKRYYGRILHYLKAKEYSHCAWTIVRVEILRNFYFINRLTGYLRN

SEQ ID NO: 1298 - protein, 166 aa, Homo sapiens
MSYNLLGFLQRSCNFQCQKLLWQLNGRLEYCLKDRMNFDIPEEIKQLQQFQKEDAALTIYEMLQNIFAIFRQDSSSTGWNETIVENLLANVYHQINHLKTVLEEKLEKEDFTRGKLMSSLHLKRYYGRILHYLKAKEYSHCAWTIVRVEILRNFYFINRLTGYLRN

SEQ ID NO: 1299 - protein, 166 aa, Homo sapiens
MSYNLLGFLQRSSNFQCQKLLWQLNGRLEYCLKDRMNFDIPEEIKQLQQFQKEDAALTIYEMLQNIFAIFRQDSSSTGWNETIVENLLANVYHCINHLKTVLEEKLEKEDFTRGKLMSSLHLKRYYGRILHYLKAKEYSHCAWTIVRVEILRNFYFINRLTGYLRN

SEQ ID NO: 1300 - protein, 166 aa, Homo sapiens
MSYNLLGFLQRSSNFCCQKLLWQLNGRLEYCLKDRMNFDIPEEIKQLQQFQKEDAALTIYEMLQNIFAIFRQDSSSTGWNETIVENLLANVYHQINHLKTVLEEKLEKEDFTRGKLMSSLHLKRYYGRILHYLKAKEYSHCAWTIVRVEILRNFYFINRLTGYLRN

SEQ ID NO: 1301 - protein, 166 aa, Homo sapiens
MSYNLLGFLQRSSNFQCQKLLWQLNGRLEYCLKDRMNFDIPEEIKQLQQFQKEDAALTIYEMLQNIFAIFRQDSSSTGWNETIVENLLACVYHQINHLKTVLEEKLEKEDFTRGKLMSSLHLKRYYGRILHYLKAKEYSHCAWTIVRVEILRNFYFINRLTGYLRN

SEQ ID NO: 1302 - protein, 166 aa, Homo sapiens
MSYNLLGFLQRSSNFQCQKLLWQLNGRLEYCLKDRMNFDIPEEIKQLQQFQKEDAALTIYEMLQNIFAIFRQDSSSTGWNETIVENLLANCYHQINHLKTVLEEKLEKEDFTRGKLMSSLHLKRYYGRILHYLKAKEYSHCAWTIVRVEILRNFYFINRLTGYLRN

SEQ ID NO: 1303 - protein, 165 aa, Homo sapiens
CDLPQTHSLGSRRTLMLLAQMRRISLFSCLKDRHDFGFPQEEFGNQFQKAETIPVLHEMIQQIFNLFSTKDSSAAWDETLLDKFYTELHQQLNDLEACVIQGVGVTETPLMKEDSILAVRKYFQRITLYLKEKKYSPCAWEVVRAEIMRSFSLSTNLQESLRSKE

SEQ ID NO: 1304 - DNA, 46 bp, Artificial Sequence
  primer reverse IFNA-E159H
aaggatcctcattccttacttcttaaactgtgttgcaagtttgttg

SEQ ID NO: 1305 - DNA, 46 bp, Artificial Sequence
  primer reverse IFNA-E159Q
aaggatcctcattccttacttcttaaactctgttgcaagtttgttg

SEQ ID NO: 1306 - DNA, 41 bp, Artificial Sequence
  primer reverse IFNA-E159Q
aacatatgtgtgatctgcctcaaacccacagcctgggtagc

What is claimed is:

1. A modified cytokine that exhibits increased resistance to proteolysis compared to the unmodified cytokine or a modified cytokine selected from the group consisting of modified cytokines comprising a sequence of amino acids set forth in any of SEQ ID Nos. 2-181, 233-1303 or a structural homolog thereof.

2. The modified cytokine of claim 1, selected from the group consisting of a member of the interferons/interleukin-10 protein family, a member of the long-chain cytokine family and a member of the short-chain cytokine family, wherein the modified cytokine is a modified interferon α of any of SEQ ID Nos. 87, 89, 90, 93, 96, 101, 103, 107, 124, 979, 980, 983, 984, 985, 986 and 987 or a cytokine modified on the basis of 3-dimensional structural homology with any of SEQ ID Nos. 87, 89, 90, 93, 96, 101, 103, 107, 124, 979, 980, 983, 984, 985, 986 and 987.

3. The modified cytokine of claim 1 selected from the group consisting of interleukin-10 (IL-10), interferon beta (IFNβ), interferon alpha-2a (IFNα-2a), interferon alpha-2b (IFNα-2b), and interferon gamma (IFN-y), granulocyte colony stimulating factor (G-CSF), leukemia inhibitory factor (LIF), human growth hormone (hGH), ciliary neurotrophic factor (CNTF), leptin, oncostatin M, interleukin-6 (IL-6) and interleukin-12 (IL-12), erythropoietin (EPO), granulocyte-macrophage colony stimulating factor (GM-CSF), interleukin-2 (IL-2), interleukin-3 (IL-3), interleukin-4 (IL-4), interleukin-5 (IL-5), interleukin-13 (IL-13), Flt3 ligand and stem cell factor (SCF).

4. The modified cytokine of claim 1, that is an interferon.

5. The modified cytokine of claim 1, that is an interferon α-2b (IFNα-2b), interferon α-2a (IFNα-2a), interferon α-2c (IFNα-2c) or an interferon having the sequence set forth in SEQ ID No. 232.

6. A modified cytokine of claim 4, that is IFNα-2b or IFNα-2a or IFNα-2C selected from the group consisting of proteins comprising one or more single amino acid replacements in SEQ ID No.1 or 182, corresponding to the replacement of: L by V at position 3; L by I at position 3; P by S at position 4; P by A at position 4; R by H at position 12; R by Q at position 12; R by H at position 13; R by Q at position 13; M by V at position 16; M by I at position 16; R by H at position 22; R by Q at position 22; R or K by H at position 23; R or K by Q at position 23; F by I at position 27; F by V at position 27; L by V at position 30; L by I at position 30; K by Q at position 31; K by T at position 31; R by H at position 33; R by Q at position 33; E by Q at position 41; E by H at position 41; K by Q at position 49; K by T at position 49; E by Q at position 58; E by H at position 58; K by Q at position 70; K by T at position 70; E by Q at position 78; E by H at position 78; K by Q at position 83; K by T at position 83; Y by H at position 89; Y by I at position 89; E by Q at position 96; E by H at position 96; E by Q at position 107; E by H at position 107; P by S at position 109; P by A at position 109; L by V at position 110; L by I at position 110; M by V at position 111; M by I at position 111; E by Q at position 113; E by H at position 113; L by V at position 117; L by I at position 117; R by H at position 120; R by Q at position 120; K by Q at position 121; K by T at position 121; R by H at position 125; R by Q at position 125; L by V at position 128; L by I at position 128; K by Q at position 131; K by T at position 131; E by Q at position 132; E by H at position 132; K by Q at position 133; K by T at position 133; K by Q at position 134; K by T at position 134; Y by H at position 135; Y by I at position 135; P by S at position 137; P by A at position 137; M by V at position 148; M by I at position 148; R by H at position 149; R by Q at position 149; E by Q at position 159; E by H at position 159; L by V at position 161; L by I at position 161; R by H at position 162; R by Q at position 162; K by Q at position 164; K by T at position 164; E by Q at position 165; and E by H at position 165,
wherein residue 1 corresponds to residue 1 of the mature IFNα-2b or IFNα-2a cytokine set forth in SEQ ID NOS:1 or 182.

7. The modified cytokine of claim 6, wherein:
the protein is human;
has more resistance to proteolysis than the unmodified protein; and
the protein is selected from the group consisting of proteins comprising one or more single amino acid replacements in SEQ ID NOS:1 or 182, corresponding to: F by V at position 27; R by H at position 33; E by Q at position 41; E by H at position 41; E by Q at position 58; E by H at position 58; E by Q at position 78; E by H at position 78; Y by H at position 89; E by Q at position 107; E by H at position 107; P by A at position 109; L by V at position 110; M by V at position 111; E by Q at position 113; E by H at position 113; L by V at position 117; L by I at position 117; K by Q at position 121; K by T at position 121; R by H at position 125; R by Q at position 125; K by Q at position 133; K by T at position 133; E by Q at position 159 and E by H at position 159.

8. A modified IFNα-2b or IFNα-2a cytokine of claim 5 selected from the group consisting of proteins comprising one or more sets of dual-amino acid replacements in SEQ ID NOS:1 or 182, corresponding to:
D by N at position 2 and P by S at position 4;
D by N at position 2 and P by T at position 4;
L by N at position 3 and Q by S at position 5;
L by N at position 3 and Q by T at position 5;
P by N at position 4 and T by S at position 6;
P by N at position 4 and T by T at position 6;
Q by N at position 5 and H by S at position 7;
Q by N at position 5 and H by T at position 7;
T by N at position 6 and S by S at position 8;
T by N at position 6 and S by T at position 8;
H by N at position 7 and L by S at position 9;
H by N at position 7 and L by T at position 9;
S by N at position 8 and G by S at position 10;
S by N at position 8 and G by T at position 10;
L by N at position 9 and S by S at position 11;
L by N at position 9 and S by T at position 11;
M by N at position 21 and K by S at position 23;
M by N at position 21 and K by T at position 23;
R by N at position 22 and I by S at position 24;
R by N at position 22 and I by T at position 24;
R or K by N at position 23 and S by S at position 25;
R or K by N at position 23 and S by T at position 25;
I by N at position 24 and L by S at position 26;
I by N at position 24 and L by T at position 26;
S by N at position 25 and F by S at position 27;
S by N at position 25 and F by T at position 27;
L by N at position 26 and S by S at position 28;
L by N at position 26 and S by T at position 28;
S by N at position 28 and L by S at position 30;
S by N at position 28 and L by T at position 30;
L by N at position 30 and D by S at position 32;
L by N at position 30 and D by T at position 32;
K by N at position 31 and R by S at position 33;
K by N at position 31 and R by T at position 33;
D by N at position 32 and H by S at position 34;
D by N at position 32 and H by T at position 34;
R by N at position 33 and D by S at position 35;
R by N at position 33 and D by T at position 35;
H by N at position 34 and F by S at position 36;
H by N at position 34 and F by T at position 36;
D by N at position 35 and G by S at position 37;
D by N at position 35 and G by T at position 37;
F by N at position 36 and F by S at position 38;
F by N at position 36 and F by T at position 38;
G by N at position 37 and P by S at position 39;
G by N at position 37 and P by T at position 39;
F by N at position 38 and Q by S at position 40;
F by N at position 38 and Q by T at position 40;
P by N at position 39 and E by S at position 41;
P by N at position 39 and E by T at position 41;
Q by N at position 40 and E by S at position 42;
Q by N at position 40 and E by T at position 42;
E by N at position 41 and F by S at position 43;
E by N at position 41 and F by T at position 43;
E by N at position 42 and G by S at position 44;
E by N at position 42 and G by T at position 44;
F by N at position 43 and N by S at position 45;
F by N at position 43 and N by T at position 45;
G by N at position 44 and Q by S at position 46;
G by N at position 44 and Q by T at position 46;
N by N at position 45 and F by S at position 47;
N by N at position 45 and F by T at position 47;
Q by N at position 46 and Q by S at position 48;
Q by N at position 46 and Q by T at position 48;
F by N at position 47 and K by S at position 49;
F by N at position 47 and K by T at position 49;
Q by N at position 48 and A by S at position 50;
Q by N at position 48 and A by T at position 50;
K by N at position 49 and E by S at position 51;
K by N at position 49 and E by T at position 51;
A by N at position 50 and T by S at position 52;
A by N at position 50 and T by T at position 52;
S by N at position 68 and K by S at position 70;
S by N at position 68 and K by T at position 70;
K by N at position 70 and S by S at position 72;
K by N at position 70 and S by T at position 72;
A by N at position 75 and D by S at position 77;
A by N at position 75 and D by T at position 77;
D by N at position 77 and T by S at position 79;
D by N at position 77 and T by T at position 79;
I by N at position 100 and G by S at position 102;
I by N at position 100 and G by T at position 102;
Q by N at position 101 and V by S at position 103;
Q by N at position 101 and V by T at position 103;
G by N at position 102 and G by S at position 104;
G by N at position 102 and G by T at position 104;
V by N at position 103 and V by S at position 105;
V by N at position 103 and V by T at position 105;
G by N at position 104 and T by S at position 106;
G by N at position 104 and T by T at position 106;
V by N at position 105 and E by S at position 107;
V by N at position 105 and E by T at position 107;
T by N at position 106 and T by S at position 108;
T by N at position 106 and T by T at position 108;
E by N at position 107 and P by S at position 109;
E by N at position 107 and P by T at position 109;
T by N at position 108 and I by S at position 110;
T by N at position 108 and I by T at position 110;
K by N at position 134 and S by S at position 136;
K by N at position 134 and S by T at position 136;
S by N at position 154 and N by S at position 156;
S by N at position 154 and N by T at position 156;
T by N at position 155 and L by S at position 157;
T by N at position 155 and L by T at position 157;
N by N at position 156 and Q by S at position 158;
N by N at position 156 and Q by T at position 158;
L by N at position 157 and E by S at position 159;
L by N at position 157 and E by T at position 159;
Q by N at position 158 and S by S at position 160;
Q by N at position 158 and S by T at position 160;
E by N at position 159 and L by S at position 161;
E by N at position 159 and L by T at position 161;
S by N at position 160 and R by S at position 162;
S by N at position 160 and R by T at position 162;
L by N at position 161 and S by S at position 163;
L by N at position 161 and S by T at position 163;
R by N at position 162 and K by S at position 164;
R by N at position 162 and K by T at position 164;
S by N at position 163 and E by S at position 165; and
S by N at position 163 and E by T at position 165,
wherein residue 1 corresponds to residue 1 of the mature IFNα-2b or IFNα-2a cytokine set forth in SEQ ID NOS:1 or 182.

9. A modified IFNα-2b or IFNα-2a mutant cytokine of claim 5 selected from the group consisting of proteins comprising one or more sets of dual amino acid replacements in SEQ ID NOS:1 or 182, corresponding to:
Q by N at position 5 and H by S at position 7;
P by N at position 39 and E by S at position 41;
P by N at position 39 and E by T at position 41;
Q by N at position 40 and E by S at position 42;
Q by N at position 40 and E by T at position 42;
E by N at position 41 and F by S at position 43;
E by N at position 41 and F by T at position 43;
F by N at position 43 and N by S at position 45;
G by N at position 44 and Q by T at position 46;
N by N at position 45 and F by S at position 47;
N by N at position 45 and F by T at position 47;
Q by N at position 46 and Q by S at position 48;
F by N at position 47 and K by S at position 49;
F by N at position 47 and K by T at position 49;
I by N at position 100 and G by S at position 102;
I by N at position 100 and G by T at position 102;
V by N at position 105 and E by S at position 107;
V by N at position 105 and E by T at position 107;
T by N at position 106 and T by S at position 108;
T by N at position 106 and T by T at position 108;
E by N at position 107 and P by S at position 109;
E by N at position 107 and P by T at position 109;
L by N at position 157 and E by S at position 159;
L by N at position 157 and E by T at position 159;
E by N at position 159 and L by S at position 161; and
E by N at position 159 and L by T at position 161.

10. A modified cytokine of claim 5, further comprising one or more pseudo-wild type mutations.

11. The modified cytokine of claim 10 that is IFNα-2b or IFNα-2a.

12. A modified IFNα-2b or IFNα-2a cytokine of claim 11, comprising one or more pseudo-wild type mutations at amino acid positions of IFNα-2b or IFNα-2a corresponding to SEQ ID NOS:1 or 182, amino acid residues: 9, 10, 17, 20, 24, 25, 35, 37, 41, 52, 54, 56, 57, 58, 60, 63, 64, 65, 76, 89, and 90, wherein the mutations are selected from the group consisting of one or more of insertions, deletions and replacements of the native amino acid residue(s), wherein residue 1 corresponds to residue 1 of the mature IFNα-2b or IFNα-2a protein set forth in SEQ ID NOS:1 or 182.

13. A modified IFNα-2b or IFNα-2a cytokine of claim 11, comprising one wherein the pseudo-wild type replacements are one or more mutations in SEQ ID No. 1 or 182 corresponding to:
P by A at position 4; Q by A at position 5,
T by A at position 6; L by A at position 9,
LG by A at position 10; L by A at position 17,
Q by A at position 20; I by A at position 24,
S by A at position 25; D by A at position 35,
G by A at position 37; G by A at position 39;
E by A at position 41; E by A at position 42
E by A at position 51; T by A at position 52,
P by A at position 54; V by A at position 55
L by A at position 56; H by A at position 57,
E by A at position 58; I by A at position 60,
I by A at position 63; F by A at position 64,
N by A at position 65; W by A at position 76,
D by A at position 77; E by A at position 78
L by A at position 81; Y by A at position 85
Y by A at position 89; Q by A at position 90
G by A at position 104; L by A at position 110
S by A at position 115 and E by A at position 146.

14. A modified cytokine of claim 5, comprising one or more pseudo-wild type mutations at amino acid positions of IFNα-2b, IFNα-2c or a protein having the sequence set forth in SEQ ID No. 232 corresponding amino acid residues: 4, 5, 6, 9, 10, 17, 20, 24, 25, 35, 37, 39, 41, 42, 51, 52, 54, 56, 57, 58, 60, 63, 64, 65, 76, 77, 78, 81, 85, 89, 90, 104, 110, 115 and 146 to SEQ ID No. 1, 182 or 232, wherein the mutations are selected from the group consisting of one or more of insertions, deletions and replacements of the native amino acid residue(s), wherein residue 1 corresponds to residue 1 of the mature interferon set forth in SEQ ID No.1, 182 or 232.

15. The modified cytokin of claim 14, wherein the pseudowild type replacements are one or more mutations selected from:
P by A at position 4; Q by A at position 5;
T by A at position 6; L by A at position 9;
LG by A at position 10; L by A at position 17;
Q by A at position 20; I by A at position 24;
S by A at position 25; D by A at position 35;
G by A at position 37; G by A at position 39;
E by A at position 41; E by A at position 42;
E by A at position 51; T by A at position 52;
P by A at position 54; V by A at position 55;
L by A at position 56; H by A at position 57;
E by A at position 58; I by A at position 60;
I by A at position 63; F by A at position 64;
N by A at position 65; W by A at position 76;
D by A at position 77; E by A at position 78;
L by A at position 81; Y by A at position 85;
Y by A at position 89, Q by A at position 90;
G by A at position 104; L by A at position 110;
S by A at position 115 and E by A at position 146, wherein the positions correspond to SEQ ID No. 1, 182, 185 or 232.

16. A modified cytokine of claim 5 that has increased antiviral activity compared to the unmodified cytokine.

17. The modified cytokine of claim 16, wherein antiviral activity is assessed by measuring replication by reverse transcription quantification PCR (RT-qPCR).

18. A modified cytokine of claim 5 that has more antiviral activity than antiproliferative activity compared to the unmodified cytokine.

19. The modified cytokine of claim 18, wherein antiproliferative activity is assessed by measuring cell proliferation in the presence of the cytokine.

20. A modified cytokine of claim 5 that that binds to an IFN receptor, but exhibits decreased antiviral activity and decreased antiproliferative activity relative to its receptor binding activity when compared to the unmodified cytokine.

21. A modified cytokine of claim 1, comprising two or more mutations.

22. The modified cytokine of claim 21 that is a modified IFNα-2b cytokine.

23. A modified cytokine of claim 1, wherein the cytokine comprises the sequence of amino acids set forth in any of SEQ ID Nos 2 through 181, wherein the arginine at position 23 is replaced with a lysine.

24. A modified cytokine of any claim 1 selected from the group consisting of interleukin-10 (IL-10), interferon beta (IFNβ), interferon alpha (IFNα), interferon gamma (IFN-y), granulocyte colony stimulating factor (G-CSF), leukemia inhibitory factor (LIF), human growth hormone (hGH), ciliary neurotrophic factor (CNTF), leptin, oncostatin M, interleukin-6 (IL-6) and interleukin-12 (IL-12), erythropoietin (EPO), granulocyte-macrophage colony stimulating factor (GM-CSF), interleukin-2 (IL-2), interleukin-3 (IL-3), interleukin-4 (IL-4), interleukin-5 (IL-5), interleukin-13 (IL-13), Flt3 ligand and stem cell factor (SCF).

25. A collection of the modified cytokines of claim 1, wherein the modified cytokines contain one or a plurality of mutations.

26. A nucleic acid molecule encoding a modified cytokine of claim 1.

27. A vector comprising a nucleic acid molecule of claim 26.

28. A eukaryotic cell, comprising the vector of claim 27.

29. A collection of nucleic acid molecules comprising a plurality of the molecules of claim 26.

30. A collection of nucleic acid molecules comprising a plurality of the vectors of claim 27.

31. A method for expression of a modified cytokine, comprising:
introducing a nucleic acid of claim 26 into a host; and
culturing the cell, under conditions and in which the modified encoded cytokines are expressed.

32. The method of claim 31, wherein the nucleic acid is introduced into a host cell.

33. The method of claim 31, wherein the cytokine is a modified IFNα-2b, IFNα-2a cytokine IFNα-2c or interferon of SEQ ID No. 232.

34. The method of claim 31, wherein the host is a eukaryotic host cell.

35. The method of claim 34, wherein the cytokine is glycosylated.

36. The method of claim 31, wherein expression is effected in vivo.

37. The method of claim 31, wherein expression is effected in vitro.

38. The method of claim 31, wherein expression is effected in a cell-free system.

39. A modified cytokine claim 2, comprising two or more mutations.

40. A pharmaceutical composition, comprising a cytokine of claim 1 in a pharmaceutically acceptable carrier.

41. A modified cytokine of claim 5 that exhibits greater resistance to proteolysis compared to the unmodified cytokine, comprising one or more amino acid replacements at one or more positions on the cytokine corresponding to a structurally-related modified amino acid position within the 3-dimensional structure of the IFNα-2b or IFNα-2a or IFNα-2c or consensus IFNα of SEQ ID No. 232.

42. A modified cytokine of claim 41, wherein the resistance to proteolysis is measured by mixing it with a protease in vitro, incubation with blood or incubation with serum.

43. A modified cytokine of claim 1 that is a structural homolog of IFNα-2b, comprising one or more amino acid replacements in the cytokine structural homolog at positions corresponding to the 3-dimensional-structurally-similar modified positions within the 3-D structure of the modified IFNα-2b or IFNα-2a or IFNα 2c or an interferon of SEQ ID No. 232.

44. A modified cytokine of claim 43, wherein the homolog has increased resistance to proteolysis compared to its unmodified cytokine counterpart, wherein the resistance to proteolysis is measured by mixture with a protease in vitro, incubation with blood or incubation with serum.

45. The cytokine of claim 44 that is an IFNα cytokine.

46. The cytokine of claim 45, selected from the group consisting of IFNα-2a, IFNα-c, IFNα-2c, IFNα-d, IFNα-5, IFNα-6, IFNα-4, IFNα-4b, IFNα-I, IFNα-J, IFNα-H, IFNα-F, IFNα-8, and IFNα-consensus cytokine.

47. A modified cytokine of claim 1 that is modified IFNα-2a cytokine, comprising one or more amino acid replacements at one or more target positions in SEQ ID NO. 182 in the IFNα-2a corresponding to a structurally-related modified amino acid position within the 3-dimensional structure of unmodified IFNα-2b, wherein the replacements lead to greater resistance to proteases, as assessed by incubation with a protease or a with a blood lysate or by incubation with serum, compared to the unmodified IFN alpha-2a.

48. The modified IFNα-2a of claim 47, that is human and is selected from the group consisting of cytokines comprising one or more single amino acid replacements in SEQ ID NO: 182, corresponding to amino acid positions 41, 58, 78, 107, 117, 125, 133 and 159.

49. A modified IFNα-c cytokine, comprising one or more amino acid replacements at one or more target positions in SEQ ID NO. 183 in the IFNα-c corresponding to a structurally-related modified amino acid position within the 3-dimensional structure of IFNα-2b modified cytokines of claim 5, wherein the replacements lead to greater resistance to proteases, as assessed by incubation with a protease or a with a blood lysate or by incubation with serum, compared to the unmodified IFN alpha-c.

50. The modified IFNα-c of claim 49, that is human and is selected from the group consisting of cytokines comprising one or more single amino acid replacements in SEQ ID NO: 183, corresponding to amino acid positions 41, 59, 79, 108, 118, 126, 134 and 160.

51. A modified IFNα-c, comprising one or more amino acid replacements at one or more target positions in SEQ ID NO: 185 in the IFNα-2c corresponding to a structurally-related modified amino acid position within the 3-dimensional structure of IFNα-2b modified cytokines of claim 5, wherein the replacements lead to greater resistance to proteases, as assessed by incubation with a protease or a with a blood lysate or by incubation with serum, compared to the unmodified IFNα-2c.

52. The modified IFNα-2c cytokine of claim 51, that is human and is selected from the group consisting of cytokines comprising one or more single amino acid replacements in SEQ ID NO: 185, corresponding to amino acid positions 27, 33, 41, 59, 79, 90, 108, 110, 111, 112, 114, 118, 122, 126, 134 and 160.

53. A modified IFNα-d cytokine, comprising one or more amino acid replacements at one or more target positions in SEQ ID NO: 186 in the IFNα-d corresponding to a structurally-related modified amino acid position within the 3-dimensional structure of IFNα-2b modified cytokines of claim 5, wherein the replacements lead to greater resistance to proteases, as assessed by incubation with a protease or a with a blood lysate or by incubation with serum, compared to the unmodified IFNα-d.

54. The IFNα-d modified cytokine of claim 53, that is human and is selected from the group consisting of cytokines comprising one or more single amino acid replacements in SEQ ID NO: 186, corresponding to amino acid positions 27, 33, 41, 59, 79, 90, 108, 110, 111, 112, 114, 118, 122, 126, 134 and 160.

55. A modified IFNα-5 cytokine, comprising one or more amino acid replacements at one or more target positions in SEQ ID NO: 187 in the IFNα-5 corresponding to a structurally-related modified amino acid position within the 3-dimensional structure of IFNα-2b modified cytokines of claim 5, wherein the replacements lead to greater resistance to proteases, as assessed by incubation with a protease or a with a blood lysate or by incubation with serum, compared to the unmodified IFNα-5.

56. The IFNα-5 modified cytokine of claim 55, that is human and is selected from the group consisting of cytokines comprising one or more single amino acid replacements in SEQ ID NO: 187, corresponding to amino acid positions 27, 33, 41, 59, 79, 90, 108, 110, 111, 112, 114, 118, 122, 126, 134and 160.

57. A modified IFNα-6 cytokine, comprising one or more amino acid replacements at one or more target positions in SEQ ID NO: 188 in the IFNα-6 corresponding to a structurally-related modified amino acid position within the 3-dimensional structure of IFNα-2b modified cytokines of claim 5, wherein the replacements lead to greater resistance to proteases, as assessed by incubation with a protease or a with a blood lysate or by incubation with serum, compared to the unmodified IFNα-6.

58. The IFNα-6 modified cytokine of claim 57, that is human and is selected from the group consisting of cytokines comprising one or more single amino acid replacements in SEQ ID NO: 188, corresponding to amino acid positions 27, 33, 41, 59, 79, 90, 108, 110, 111, 112, 114, 118, 122, 126, 134 and 160.

59. A modified IFNα-4 cytokine, comprising one or more amino acid replacements at one or more target positions in SEQ ID NO: 189 in the IFNα-4 corresponding to a structurally-related modified amino acid position within the 3-dimensional structure of IFNα-2b modified cytokines of claim 5, wherein the replacements lead to greater resistance to proteases, as assessed by incubation with a protease or a with a blood lysate or by incubation with serum, compared to the unmodified IFNα-4.

60. The IFNα-4 modified cytokine of claim 59, that is human and is selected from the group consisting of cytokines comprising one or more single amino acid replacements in SEQ ID NO: 189, corresponding to amino acid positions 27, 33, 41, 59, 79, 90, 108, 110, 111, 112, 114, 118, 122, 126, 134 and 160.

61. A modified IFNα-4b cytokine, comprising one or more amino acid replacements at one or more target positions in SEQ ID NO: 190 in the IFNα-4b corresponding to a structurally-related modified amino acid position within the 3-dimensional structure of IFNα-2b modified cytokines of claim 5, wherein the replacements lead to greater resistance to proteases, as assessed by incubation with a protease or a with a blood lysate or by incubation with serum, compared to the unmodified IFNα-4b.

62. The IFNα-4b modified cytokine of claim 61, that is human and is selected from the group consisting of cytokines comprising one or more single amino acid replacements in SEQ ID NO: 190, corresponding to amino acid positions 27, 33, 41, 59, 79, 90, 108, 110, 111, 112, 114, 118, 122, 126, 134 and 160.

63. A modified IFNα-I cytokine, comprising one or more amino acid replacements at one or more target positions in SEQ ID NO: 191 in the IFNα-I corresponding to a structurally-related modified amino acid position within the 3-dimensional structure of IFNα-2b modified cytokines of claim 5, wherein the replacements lead to greater resistance to proteases, as assessed by incubation with a protease or a with a blood lysate or by incubation with serum, compared to the unmodified IFNα-I.

64. The IFNα-I modified cytokine of claim 63, that is human and is selected from the group consisting of cytokines comprising one or more single amino acid replacements in SEQ ID NO: 191, corresponding to amino acid positions 27, 33, 41, 59, 79, 90, 108, 110, 111, 112, 114, 118, 122, 126, 134 and 160.

65. A modified IFNα-J cytokine, comprising one or more amino acid replacements at one or more target positions in SEQ ID NO: 192 in the IFNα-J corresponding to a structurally-related modified amino acid position within the 3-dimensional structure of IFNα-2b modified cytokines of claim 5, wherein the replacements lead to greater resistance to proteases, as assessed by incubation with a protease or a with a blood lysate or by incubation with serum, compared to the unmodified IFNα-J.

66. The IFNα-J modified cytokine of claim 65, that is human and is selected from the group consisting of cytokines comprising one or more single amino acid replacements in SEQ ID NO: 192, corresponding to amino acid positions 27, 33, 41, 59, 79, 90, 108, 110, 111, 112, 114, 118, 122, 126, 134and 160.

67. A modified IFNα-H cytokine, comprising one or more amino acid replacements at one or more target positions in SEQ ID NO: 193 in the IFNα-H corresponding to a structurally-related modified amino acid position within the 3-dimensional structure of IFNα-2b modified cytokines of claim 5, wherein the replacements lead to greater resistance to proteases, as assessed by incubation with a protease or a with a blood lysate or by incubation with serum, compared to the unmodified IFNα-H.

68. The IFNα-H modified cytokine of claim 67, that is human and is selected from the group consisting of cytokines comprising one or more single amino acid replacements in SEQ ID NO: 193, corresponding to amino acid positions 27, 33, 41, 59, 79, 90, 108, 110, 111, 112, 114, 118, 122, 126, 134 and 160.

69. An IFNα-F cytokine, comprising one or more amino acid replacements at one or more target positions in SEQ ID NO: 194 in the IFNα-F corresponding to a structurally-related modified amino acid position within the 3-dimensional structure of IFNα-2b modified cytokines of claim 5, wherein the replacements lead to greater resistance to proteases, as assessed by incubation with a protease or a with a blood lysate or by incubation with serum, compared to the unmodified IFNα-F.

70. The IFNα-F modified cytokine of claim 69, that is human and is selected from the group consisting of cytokines comprising one or more single amino acid replacements in SEQ ID NO: 194, corresponding to amino acid positions 27, 33, 41, 59, 79, 90, 108, 110, 111, 112, 114, 118, 122, 126, 134and 160.

71. An IFNα-8 cytokine, comprising one or more amino acid replacements at one or more target positions in SEQ ID NO: 195 in the IFNα-8 corresponding to a structurally-related modified amino acid position within the 3-dimensional structure of IFNα-2b modified cytokines of claim 5, wherein the replacements lead to greater resistance to proteases, as assessed by incubation with a protease or a with a blood lysate or by incubation with serum, compared to the unmodified IFNα-8.

72. The IFNα-8 modified cytokine of claim 71, that is human and is selected from the group consisting of cytokines comprising one or more single amino acid replacements in SEQ ID NO: 195, corresponding to amino acid positions 27, 33, 41, 59, 79, 90, 108, 110, 111, 112, 114, 118, 122, 126, 134 and 160.

73. An IFNα-consensus cytokine, comprising one or more amino acid replacements at one or more target positions in SEQ ID NO: 232 in the IFNα-consensus cytokine corresponding to a structurally-related modified amino acid position within the 3-dimensional structure of IFNα-2b modified cytokines of claim 5, wherein the replacements lead to greater resistance to proteases, as assessed by incubation with a protease or a with a blood lysate or by incubation with serum, compared to the unmodified IFNα-consensus.

74. The modified cytokine of claim 1 that is an IFNα-consensus cytokine, that is human and is selected from the group consisting of cytokines comprising one or more single amino acid replacements in SEQ ID NO: 232, corresponding to amino acid positions 27, 33, 41, 59, 79, 90, 108, 110, 111, 112, 114, 118, 122, 126, 134and 160.

75. A modified IFNβ cytokine, comprising one or more amino acid replacements at one or more target positions in SEQ ID NO: 196 in the IFNα-β cytokine corresponding to a structurally-related modified amino acid position within the 3-dimensional structure of IFNα-2b modified cytokines of claim 5, wherein the replacements lead to greater resistance to proteases, as assessed by incubation with a protease or a with a blood lysate or by incubation with serum, compared to the unmodified IFNβ.

76. A modified IFNβ cytokine of claim 1, comprising mutations at one or more amino acid residues of IFNβ corresponding to SEQ ID NO: 196 at positions corresponding to: 39, 42, 45, 47, 52, 67, 71, 73, 81, 107, 108, 109, 110, 111, 113, 116, 120, 123, 124, 128, 130, 134, 136, 137, 163 and 165, wherein the mutations comprise insertions, deletions and replacements of the native amino acid residue(s).

77. The modified IFNβ cytokine of claim 75, wherein the replacements are selected from the group consisting of amino acid sustitutions in SEQ ID NO:196 corresponding to: D by Q at position 39, D by H at position 39, D by G at position 39, E by Q at position 42, E by H at position 42, K by Q at position 45, K by T at position 45, K by S at position 45, K by H at position 45, L by V at position 47, L by I at position 47, L by T at position 47, L by Q at position 47, L by H at position 47, L by A at position 47, K by Q at position 52, K by T at position 52, K by S at position 52, K by H at position 52, F by I at position 67, F by V at position 67, R by H at position 71, R by Q at position 71, D by H at position 73, D by G at position 73, D by Q at position 73, E by Q at position 81, E by H at position 81, E by Q at position 107, E by H at position 107, K by Q at position 108, K by T at position 108, K by S at position 108, K by H at position 108, E by Q at position 109, E by H at position 109, D by Q at position 110, D by H at position 110, D by G at position 110, F by I at position 111, F by V at position 111, R by H at position 113, R by Q at position 113, L by V at position 116, L by I at position 116, L by T at position 116, L by Q at position 116, L by H at position 116, L by A at position 116, L by V at position 120, L by I at position 120, L by T at position 120, L by Q at position 120, L by H at position 120, L by A at position 120, K by Q at position 123, K by T at position 123, K by S at position 123, K by H at position 123, R by H at position 124,, R by Q at position 124, R by H at position 128, R by Q at position 128, L by V at position 130, L by I at position 130, L by T at position 130, L by Q at position 130, L by H at position 130, L by A at position 130, K by Q at position 134, K by T at position 134, K by S at position 134, K by H at position 134, K by Q at position 136, K by T at position 136, K by S at position 136,, K by H at position 136, E by Q at position 137, E by H at position 137, Y by H at position 163, Y by I at position 1631, R by H at position 165, R by Q at position 165, wherein the first amino acid listed is substituted by the second at the position indicated.

78. A modified cytokine that is an IFNβ-1 cytokine, comprising one or more amino acid replacements at one or more target positions in SEQ ID NO: 197 in the IFNβ-1 corresponding to a structurally-related modified amino acid position within the 3-dimensional structure of IFNα-2b modified cytokines of claim 5, wherein the replacements lead to greater resistance to proteases, as assessed by incubation with a protease or a with a blood lysate or by incubation with serum, compared to the unmodified IFNβ-1.

79. A modified cytokine of claim 4 that is an IFNβ-1 cytokine, comprising mutations at one or more amino acid residues of IFNβ-1 corresponding to SEQ ID NO: 197 at positions 39, 42, 45, 47, 52, 67, 71, 73, 81, 107, 108, 109, 110, 111, 113, 116, 120, 123, 124, 128, 130, 134, 136, 137, 163 and 165, wherein the mutations comprise insertions, deletions and replacements of the native amino acid residue(s).

80. A modified cytokine that is an IFNβ-2a cytokine, comprising one or more amino acid replacements at one or more target positions in SEQ ID NO: 198 in the IFNβ-2a corresponding to a structurally-related modified amino acid position within the 3-dimensional structure of IFNα-2b modified cytokines of claim 5, wherein the replacements lead to greater resistance to proteases, as assessed by incubation with a protease or a with a blood lysate or by incubation with serum, compared to the unmodified IFNβ-2a.

81. A modified cytokine of claim 4 that is an IFNβ-2a cytokine, comprising mutations at one or more amino acid residues of IFNβ-2a corresponding to SEQ ID NO:198 at positions 39, 42, 45, 47, 52, 67, 71, 73, 81, 107, 108, 109, 110, 111, 113, 116, 120, 123, 124, 128, 130, 134, 136, 137, 163 and 165, wherein the mutations comprise insertions, deletions and replacements of the native amino acid residue(s).

82. A modified IFN-gamma cytokine, comprising one or more amino acid replacements at one or more target positions in SEQ ID NO: 199 in the IFN-gamma corresponding to a structurally-related modified amino acid position within the 3-dimensional structure of IFNα-2b modified cytokines of claim 5, wherein the replacements lead to greater resistance to proteases, as assessed by incubation with a protease or a with a blood lysate or by incubation with serum, compared to the unmodified IFN-gamma.

83. A modified cytokine of claim 4 that is an IFN-gamma cytokine, comprising mutations at one or more amino acid residues of IFN-gamma corresponding to SEQ ID NO:199 at positions 33, 37, 40, 41, 42, 58, 61, 64, 65 and 66, wherein the mutations comprise insertions, deletions and replacements of the native amino acid residue(s). \hat{ }C

84. The modified IFN-gamma cytokine of claim 82, wherein the replacements are selected from the group consisting of amino acid stitutions in SEQ ID NO:199 corresponding to:

| | | | |
|---|---|---|---|
| L33V | E41Q | K58Q | D65Q |
| L33I | E41N | K58N | D65N |
| K37Q | E41H | K61Q | D66Q, |
| K37N | E42Q | K61N | |
| K40Q | E42N | K64Q | |
| K40N | E42H | K64N | |

wherein the first amino acid listed is substituted by the second at the position indicated.

85. A modified IL-10 cytokine, comprising one or more amino acid replacements at one or more target positions in SEQ ID NO: 200 in the IL-10 corresponding to a structurally-related modified amino acid position within the 3-dimensional structure of IFNα-2b modified cytokines of claim 5, wherein the replacements lead to greater resistance to proteases, as assessed by incubation with a protease or a with a blood lysate or by incubation with serum, compared to the unmodified IL-10.

86. A modified IL-10 cytokine, comprising mutations at one or more amino acid residues of IL-10 corresponding to SEQ ID NO: 200 at positions 49, 50, 52, 53, 54, 55, 56, 57, 59, 60, 67, 68, 71, 72, 74, 75, 78, 81, 84, 85, 86, and 88, wherein the mutations comprise insertions, deletions and replacements of the native amino acid residue(s).

87. The modified IL-10 cytokine of claim 85, wherein the replacements are selected from the group consisting of amino acid stitutions in SEQ ID NO:200 corresponding to:

| | | | | |
|---|---|---|---|---|
| K49Q | E54N | L60V | Y72I | E81N |
| K49N | E54H | L60I | E74Q | E81H |
| E50Q | D55Q | E67Q | E74N | D84Q |
| E50N | D55N | E67N | E74H | D84N |
| E50H | F56I | E67H | E75Q | P85S |
| L52V | F56V | M68V | E75N | P85A |
| L52I | K57Q | M68I | E75H | D86Q |
| L53V | K57N | F71I | P78S | D86N |
| L53I | Y59H | F71V | P78A | K88Q |
| E54Q | Y59I | Y72H | E81Q | K88N, |

wherein the first amino acid listed is substituted by the second at the position indicated.

88. A modified erythropoietin cytokine, comprising one or more amino acid replacements at one or more target positions in SEQ ID NO: 201 in the erythropoietin corresponding to a structurally-related modified amino acid position within the 3-dimensional structure of IFNα-2b modified cytokines of claim 5, wherein the replacements lead to greater resistance to proteases, as assessed by incubation with a protease or a with a blood lysate or by incubation with serum, compared to the unmodified erythropoietin.

89. A modified erythropoietin of claim 88, comprising mutations at one or more amino acid residues of erythropoietin corresponding to SEQ ID NO: 201 at positions 43, 45, 48, 49, 52, 53, 55, 72, 75, 76, 123, 129, 130, 131, 162, and 165, wherein the mutations comprise insertions, deletions and replacements of the native amino acid residue(s).

90. The modified erythropoietin cytokine of claim 88, wherein the replacements are selected from the group consisting of amino acid stitutions in SEQ ID NO: 201 corresponding to:

| | | | | |
|---|---|---|---|---|
| D43Q | K52Q | E72N | P122S | R131H |
| D43N | K52N | E72H | P122A | R131Q |
| K45Q | R53H | L75V | D123Q | R162H |
| K45N | R53Q | L75I | D123N | R162Q |
| F48I | E55Q | R76H | P129S | D165Q |
| F48V | E55N | R76Q | P129A | D165N |
| Y49H | E55H | P121S | L130V | |
| Y49I | E72Q | P121A | L130I | |

wherein the first amino acid listed is substituted by the second at the position indicated.

91. A modified GM-CSF cytokine, comprising one or more amino acid replacements at one or more target positions in SEQ ID NO: 202 in the GM-CSF corresponding to a structurally-related modified amino acid position within the 3-dimensional structure of erythropoietin modified cytokines of claim 88, wherein the replacements lead to greater resistance to proteases, as assessed by incubation with a protease or a with a blood lysate or by incubation with serum, compared to the unmodified GM-CSF.

92. A modified cytokine of claim 91 that is a GM-CSF cytokine, comprising mutations at one or more amino acid residues of GM-CSF corresponding to SEQ ID NO: 202 at positions 38, 41, 45, 46, 48, 49, 51, 60, 63, 67, 92, 93, 119, 120, 123, and 124, wherein the mutations comprise insertions, deletions and replacements of the native amino acid residue(s).

93. The modified GM-CSF cytokine of claim 91, wherein the replacements are selected from the group consisting of amino acid stitutions in SEQ ID NO: 202 corresponding to:

| | | | |
|---|---|---|---|
| E38Q | D48Q | K63Q | F119V |
| E38N | D48N | K63N | D120Q |
| E38H | L49V | R67H | D120N |
| E41Q | L49I | R67Q | E123Q |
| E41N | E51Q | P92S | E123N |
| E41H | E51N | P92A | E123H |
| E45Q | E51H | E93Q | P124S |
| E45N | E60Q | E93N | P124A, |
| E45H | E60N | E93H | |
| M46V | E60H | F119I | |
| M46I | | | |

wherein the first amino acid listed is substituted by the second at the position indicated.

94. A modified Flt3 ligand cytokine, comprising one or more amino acid replacements at one or more target positions in SEQ ID NO: 203 in the Flt3 ligand corresponding to a structurally-related modified amino acid position within the 3-dimensional structure of erythropoietin modified cytokine of claim 88, wherein the replacements lead to greater resistance to proteases, as assessed by incubation with a protease or a with a blood lysate or by incubation with serum, compared to the unmodified Flt3 ligand.

95. A modified Flt3 ligand cytokine of claim 94, comprising mutations at one or more amino acid residues of Flt3 ligand corresponding to SEQ ID NO: 203 at positions 3, 40, 42, 43, 55, 58, 59, 61, 89, 90, 91, 95, and 96, wherein the mutations comprise insertions, deletions and replacements of the native amino acid residue(s).

96. The modified Flt3 ligand cytokine of claim 94, wherein the replacements are selected from the group consisting of amino acid stitutions in SEQ ID NO: 203 corresponding to:

| | | |
|---|---|---|
| D3Q | R55Q | P89A |
| D3N | E58Q | P90S |
| D40Q | E58N | P90A |
| D40N | E58H | P91S |
| E42Q | R59H | P91A |
| E42N | R59Q | R95H |
| E42H | K61Q | R95Q |
| L43V | K61N | F96I |
| L43I | P89S | F96V, |
| R55H | | |

wherein the first amino acid listed is substituted by the second at the position indicated.

97. A modified IL-2 cytokine, comprising one or more amino acid replacements at one or more target positions in SEQ ID NO: 204 in the IL-2 corresponding to a structurally-related modified amino acid position within the 3-dimensional structure of erythropoietin modified cytokines of claim 88, wherein the replacements lead to greater resistance to proteases, as assessed by incubation with a protease or a with a blood lysate or by incubation with serum, compared to the unmodified IL-2.

98. A modified IL-2 cytokine of claim 97, comprising mutations at one or more amino acid residues of IL-2 corresponding to SEQ ID NO: 204 at positions 43, 45, 48, 49, 52, 53, 60, 61, 65, 67, 68, 72, 100, 103, 104, 106, 107, 109, 110, and 132, wherein the mutations comprise insertions, deletions and replacements of the native amino acid residue(s).

99. The modified IL-2 cytokine of claim 97, wherein the replacements are selected from the group consisting of amino acid stitutions in SEQ ID NO: 204 corresponding to:

| | | | |
|---|---|---|---|
| K43Q | L53I | E68Q | Y107I |
| K43N | E60Q | E68N | D109Q |
| Y45H | E60N | E68H | D109N |
| Y45I | E60H | L72V | E110Q |
| K48Q | E61Q | L72I | E110N |
| K48N | E61N | E100Q | E110H |
| K49Q | E61H | E100N | L132V |
| K49N | P65S | E100H | L132I |
| E52Q | P65A | F103I | E106Q |
| E52N | E67Q | F103V | E106N |
| E52H | E67N | M104V | E106H |
| L53V | E67H | M104I | Y107H, |

wherein the first amino acid listed is substituted by the second at the position indicated.

100. A modified IL-3 cytokine, comprising one or more amino acid replacements at one or more target positions in SEQ ID NO: 205 in the IL-3 corresponding to a structurally-related modified amino acid position within the 3-dimensional structure of erythropoietin modified cytokines of claim 88, wherein the replacements lead to greater resistance to proteases, as assessed by incubation with a protease or a with a blood lysate or by incubation with serum, compared to the unmodified IL-3.

101. A modified IL-3 cytokine of claim 100, comprising mutations at one or more amino acid residues of IL-3 corresponding to SEQ ID NO: 205: 37, 43, 46, 59, 63, 66, 96, 100, 101, and 103, wherein the mutations comprise insertions, deletions and replacements of the native amino acid residue(s).

102. The modified IL-3 cytokine of claim 100, wherein the replacements are selected from the group consisting of amino acid stitutions in SEQ ID NO:205 corresponding to:

| | | |
|---|---|---|
| F37I | E59Q | P96A |
| F37V | E59H | K100Q |
| E43Q | R63H | K100N |
| E43N | R63Q | D101Q |
| E43H | K66Q | D101N |
| D46Q | K66N | D103Q |
| D46N | P96S | D103N, |

wherein the first amino acid listed is substituted by the second at the position indicated.

103. A modified SCF cytokine, comprising one or more amino acid replacements at one or more target positions in SEQ ID NO: 206 in the SCF corresponding to a structurally-related modified amino acid position within the 3-dimensional structure of erythropoietin modified cytokines of claim 88, wherein the replacements lead to greater resistance to proteases, as assessed by incubation with a protease or a with a blood lysate or by incubation with serum, compared to the unmodified SCF.

104. A modified SCF cytokine of claim 103, comprising mutations at one or more amino acid residues of SCF corresponding to SEQ ID NO: 206: 27, 31, 34, 37, 54, 58, 61, 62, 63, 96, 98, 99, 100, 102, 103, 106, 107, 108, 109, 134, and 137, wherein the mutations comprise insertions, deletions and replacements of the native amino acid residue(s).

105. The modified SCF cytokine of claim 103, wherein the replacements are selected from the group consisting of amino acid stitutions in SEQ ID NO: 206 corresponding to:

| | | | | | |
|---|---|---|---|---|---|
| M27V | D54Q | F63I | K100Q | E106H | E134N |
| M27I | D54N | F63V | K100N | P107S | E134H |
| K31Q | D58Q | K96Q | F102I | P107A | D137Q |
| K31N | D58N | K96N | F102V | R108H | D137N, |
| P34S | D61Q | L98V | K103Q | R108Q | |
| P34A | D61N | L98I | K103N | L109V | |
| D37Q | K62Q | K99Q | E106Q | L109I | |
| D37N | K62N | K99N | E106N | E134Q | |

wherein the first amino acid listed is substituted by the second at the position indicated.

106. A modified IL-4 cytokine, comprising one or more amino acid replacements at one or more target positions in SEQ ID NO: 207 in the IL-4 corresponding to a structurally-related modified amino acid position within the 3-dimensional structure of erythropoietin modified cytokines of claim 88, wherein the replacements lead to greater resistance to proteases, as assessed by incubation with a protease or a with a blood lysate or by incubation with serum, compared to the unmodified IL-4.

107. A modified IL-4 cytokine of claim 106, comprising mutations at one or more amino acid residues of IL-4 corresponding to SEQ ID NO: 207: 26, 37, 53, 60, 61, 64, 66, 100, 102, 103, and 126, wherein the mutations comprise insertions, deletions and replacements of the native amino acid residue(s).

108. The modified IL-4 cytokine of claim 106, wherein the replacements are selected from the group consisting of amino acid stitutions in SEQ ID NO: 207 corresponding to:

| | | | |
|---|---|---|---|
| E26Q | E60Q | L66V | E103N |
| E26N | E60N | L66I | E103H |
| E26H | E60H | P100S | K126Q |
| K37Q | K61Q | P100A | K126N, |
| K37N | K61N | K102Q | |
| R53H | R64H | K102N | |
| R53Q | R64Q | E103Q | |

wherein the first amino acid listed is substituted by the second at the position indicated.

109. A modified IL-5 cytokine, comprising one or more amino acid replacements at one or more target positions in SEQ ID NO: 208 in the IL-5 cytokine corresponding to a structurally-related modified amino acid position within the 3-dimensional structure of erythropoietin modified cytokines of claim 88, wherein the replacements lead to greater resistance to proteases, as assessed by incubation with a protease or a with a blood lysate or by incubation with serum, compared to the unmodified IL-5.

110. A modified IL-5 cytokine of claim 109, comprising mutations at one or more amino acid residues of IL-5 corresponding to SEQ ID NO: 208 at positions 32, 34, 39, 46, 47, 56, 84, 85, 88, 89, 90, 102, 110, and 111, wherein the mutations comprise insertions, deletions and replacements of the native amino acid residue(s).

111. The modified IL-5 cytokine of claim 109, wherein the replacements are selected from the group consisting of amino acid stitutions in SEQ ID NO: 208 corresponding to:

| | | | |
|---|---|---|---|
| R32H | E47N | E88N | E110Q |
| R32Q | E47H | E88H | E110N |
| P34S | E56Q | E89Q | E110H |
| P34A | E56N | E89N | W111S |
| K39Q | E56H | E89H | W111H, |
| K39N | K84Q | R90H | |
| E46Q | K84N | R90Q | |
| E46N | K85Q | E102Q | |
| E46H | K85N | E102N | |
| E47Q | E88Q | E102H | |

wherein the first amino acid listed is substituted by the second at the position indicated.

112. A modified IL-13 cytokine, comprising one or more amino acid replacements at one or more target positions in SEQ ID NO: 209 of an IL-13 corresponding to a structurally-related modified amino acid position within the 3-dimensional structure of erythropoietin modified cytokines of claim 88, wherein the replacements lead to greater resistance to proteases, as assessed by incubation with a protease or a with a blood lysate or by incubation with serum, compared to the unmodified IL-13.

113. A modified IL-13 cytokine of claim 112, comprising mutations at one or more amino acid residues of IL-13 corresponding to SEQ ID NO: 209 at positions 32, 34, 38, 48, 79, 82, 85, 86, 88, 107, 108, 110, and 111, wherein the mutations comprise insertions, deletions and replacements of the native amino acid residue(s).

114. The modified IL-13 cytokine of claim 112, wherein the replacements are selected from the group consisting of amino acid stitutions in SEQ ID NO: 209 corresponding to:

| | | | |
|---|---|---|---|
| M32V | E48H | D86N | R110H |
| M32I | F79I | K88Q | R110Q |
| W34S | F79V | K88N | F111I |
| W34H | L82V | R107H | F111V, |
| L38V | L82I | R107Q | |
| L38I | R85H | E108Q | |
| E48Q | R85Q | E108N | |
| E48N | D86Q | E108H | |

wherein the first amino acid listed is substituted by the second at the position indicated.

115. A modified G-CSF cytokine, comprising one or more amino acid replacements at one or more target positions in SEQ ID NO: 210 in the G-CSF corresponding to a structurally-related modified amino acid position within the 3-dimensional structure of IFNα-2b modified cytokines of claim 5, wherein the replacements lead to greater resistance to proteases, as assessed by incubation with a protease or a with a blood lysate or by incubation with serum, compared to the unmodified G-CSF.

116. A modified G-CSF cytokine of claim 115, comprising mutations at one or more amino acid residues of G-CSF corresponding to SEQ ID NO: 210 at positions 61, 63, 68, 72, 86, 96, 100, 101, 131, 133, 135, 147, 169, 172, and 177, wherein the mutations comprise insertions, deletions and replacements of the native amino acid residue(s).

117. The modified G-CSF cytokine of claim 115, wherein the replacements are selected from the group consisting of amino acid stitutions in SEQ ID NO: 210 corresponding to:

| | | | |
|---|---|---|---|
| W61S | F86I | E101N | F147I |
| W61H | F86V | E101H | F147V |
| P63S | E96Q | P131S | R169H |
| P63A | E96N | P131A | R169Q |
| P68S | E96H | L133V | R172H |
| P68A | P100S | L133I | R172Q |
| L72V | P100A | P135S | P177S |
| L72I | E101Q | P135A | P177A, |

wherein the first amino acid listed is substituted by the second at the position indicated.

118. A modified leptin cytokine, comprising one or more amino acid replacements at one or more target positions in SEQ ID NO: 211 in the leptin corresponding to a structurally-related modified amino acid position within the 3-dimensional structure of G-CSF modified cytokines of claim 115, wherein the replacements lead to greater resistance to proteases, as assessed by incubation with a protease or a with a blood lysate or by incubation with serum, compared to the unmodified leptin.

119. A modified leptin cytokine of claim 118, comprising mutations at one or more amino acid residues of leptin corresponding to SEQ ID NO: 211 at positions 43, 49, 99, 100, 104, 105, 107, 108, 141 and 142, wherein the mutations comprise insertions, deletions and replacements of the native amino acid residue(s).

120. The modified leptin cytokine of claim 118, wherein the replacements are selected from the group consisting of amino acid stitutions in SEQ ID NO: 211 corresponding to:

| | | | |
|---|---|---|---|
| P43S | P99A | E105Q | D108N |
| P43A | W100S | E105N | D141Q |
| L49V | W100H | E105H | D141N |
| L49I | L104V | L107V | L142V |
| P99S | L104I | L107I | L142I, |
| | | D108Q | |

wherein the first amino acid listed is substituted by the second at the position indicated.

121. A modified CNTF cytokine, comprising one or more amino acid replacements at one or more target positions in SEQ ID NO: 212 in the CNTF corresponding to a structurally-related modified amino acid position within the 3-dimensional structure of G-CSF modified cytokines of claim 115, wherein the replacements lead to greater resistance to proteases, as assessed by incubation with a protease or a with a blood lysate or by incubation with serum, compared to the unmodified CNTF.

122. A modified CNTF cytokine of claim 121, comprising mutations at one or more amino acid residues of CNTF corresponding to SEQ ID NO: 212 at positions 62, 64, 66, 67, 86, 89, 92, 100, 102, 104, 131, 132, 133, 135, 136, 138, 140, 143, 148, and 151, wherein the mutations comprise insertions, deletions and replacements of the native amino acid residue(s).

123. The modified CNTF cytokine of claim 121, wherein the replacements are selected from the group consisting of amino acid stitutions in SEQ ID NO: 212 corresponding to:

| | | | |
|---|---|---|---|
| D62Q | R89Q | E131N | E138H |
| D62N | E92Q | E131H | D140Q |
| W64S | E92N | Y132H | D140N |
| W64H | E92H | Y132I | P143S |
| E66Q | P100S | K133Q | P143A |
| E66N | P100A | K133N | D148Q |
| E66H | E102Q | P135S | D148N |
| L67V | E102N | P135A | L151V |
| L67I | E102H | R136H | L151I, |
| L86V | D104Q | R136Q | |
| L86I | D104N | E138Q | |
| R89H | E131Q | E138N | |

wherein the first amino acid listed is substituted by the second at the position indicated.

124. A modified LIF cytokine, comprising one or more amino acid replacements at one or more target positions in SEQ ID NO: 213 in the LIF corresponding to a structurally-related modified amino acid position within the 3-dimensional structure of G-CSF modified cytokines of claim 115, wherein the replacements lead to greater resistance to proteases, as assessed by incubation with a protease or a with a blood lysate or by incubation with serum, compared to the unmodified LIF.

125. A modified LIF cytokine of claim 124, comprising mutations at one or more amino acid residues of LIF corresponding to SEQ ID NO: 213 at positions 69, 70, 85, 99, 102, 104, 106, 109, 137, 143, 146, 148, 149, 153, 154, and 156, wherein the mutations comprise insertions, deletions and replacements of the native amino acid residue(s).

126. The modified LIF cytokine of claim 124, wherein the replacements are selected from the group consisting of amino acid stitutions in SEQ ID NO: 213 corresponding to:

| | | | |
|---|---|---|---|
| P69S | K102N | D143Q | K153N |
| P69A | L104V | D143N | D154Q |
| F70I | L104I | Y146H | D154N |
| F70V | P106S | Y146I | F156I |
| R85H | P106A | P148S | F156V, |
| R85Q | L109V | P148A | |
| R99H | L109I | D149Q | |
| R99Q | Y137H | D149N | |
| K102Q | Y137I | K153Q | |

wherein the first amino acid listed is substituted by the second at the position indicated.

127. A modified oncostatin M cytokine, comprising one or more amino acid replacements at one or more target positions in SEQ ID NO: 214 in the oncostatin M corresponding to a structurally-related modified amino acid position within the 3-dimensional structure of G-CSF modified cytokines of claim 115, wherein the replacements lead to greater resistance to proteases, as assessed by incubation with a protease or a with a blood lysate or by incubation with serum, compared to the unmodified oncostatin M.

128. A modified oncostatin M cytokine of claim 127, comprising mutations at one or more amino acid residues of oncostatin M corresponding to SEQ ID NO: 214 at positions 59, 60, 63, 65, 84, 87, 89, 91, 94, 97, 99, 100, 103, and 106, wherein the mutations comprise insertions, deletions and replacements of the native amino acid residue(s).

129. The modified oncostatin M cytokine of claim 127, wherein the replacements are selected from the group consisting of amino acid stitutions in SEQ ID NO: 214 corresponding to:

| | | | |
|---|---|---|---|
| E59Q | L65I | R91Q | R100Q |
| E59N | R84H | K94Q | L103V |
| E59H | R84Q | K94N | L103I |
| E60Q | D87Q | D97Q | E106Q |
| E60N | D87N | D97N | E106N |
| E60H | E89Q | E99Q | E106H, |
| R63H | E89N | E99N | |
| R63Q | E89H | E99H | |
| L65V | R91H | R100H | |

wherein the first amino acid listed is substituted by the second at the position indicated.

130. A modified IL-12 cytokine, comprising one or more amino acid replacements at one or more target positions in SEQ ID NO: 215 in the IL-12 corresponding to a structurally-related modified amino acid position within the 3-dimensional structure of G-CSF modified cytokines of claim 115, wherein the replacements lead to greater resistance to proteases, as assessed by incubation with a protease or a with a blood lysate or by incubation with serum, compared to the unmodified IL-12.

131. A modified IL-12 cytokine of claim 130, comprising mutations at one or more amino acid residues of IL-12 corresponding to SEQ ID NO: 215 at positions 56, 61, 66, 67, 68, 70, 72, 75, 78, 79, 82, 89, 92, 93, 107, 110, 111, 115, 117, 124, 125, 127, 128, 129, and 189, wherein the mutations comprise insertions, deletions and replacements of the native amino acid residue(s).

132. The modified IL-12 cytokine of claim 130, wherein the replacements are selected from the group consisting of amino acid stitutions in SEQ ID NO: 215 corresponding to:

| | | | |
|---|---|---|---|
| K56Q | E72Q | R92H | K117Q |
| K56N | E72N | R92Q | K117N |
| E61Q | E72H | K93Q | L124V |
| E61N | L75V | K93N | L124I |
| E61H | L75I | E107Q | M125V |
| L66V | R78H | E107N | M125I |
| L66I | R78Q | E107H | P127S |
| E67Q | E79Q | K110Q | P127A |
| E67N | E79N | K110N | K128Q |
| E67H | E79H | M111V | K128N |
| L68V | F82I | M111I | R129H |
| L68I | F82V | E115Q | R129Q |
| K70Q | L89V | E115N | R189H |
| K70N | L89I | E115H | R189Q, |

wherein the first amino acid listed is substituted by the second at the position indicated.

133. A modified hGH cytokine, comprising one or more amino acid replacements at one or more target positions in SEQ ID NO: 216 in the hGH corresponding to a structurally-related modified amino acid position within the 3-dimensional structure of G-CSF modified cytokines of claim 115, wherein the replacements lead to greater resistance to proteases, as assessed by incubation with a protease or a with a blood lysate or by incubation with serum, compared to the unmodified hGH.

134. A modified hGH cytokine of claim 133, comprising mutations at one or more amino acid residues of hGH corresponding to SEQ ID NO: 216 at positions 56, 59, 64, 65, 66, 88, 92, 94, 101, 129, 130, 133, 134, 140, 143, 145, 146, 147, 183, and 186, wherein the mutations comprise insertions, deletions and replacements of the native amino acid residue(s).

135. The modified hGH cytokine of claim 133, wherein the replacements are selected from the group consisting of amino acid stitutions in SEQ ID NO: 216 corresponding to:

| | | | | |
|---|---|---|---|---|
| E56Q | E66Q | L101V | R134Q | D147N |
| E56N | E66N | L101I | K140Q | R183H |
| E56H | E66H | E129Q | K140N | R183Q |
| P59S | E88Q | E129N | Y143H | E186Q |
| P59A | E88N | E129H | Y143I | E186N |
| R64H | E88H | D130Q | K145Q | E186H, |
| R64Q | F92I | D130N | K145N | |
| E65Q | F92V | P133S | F146I | |
| E65N | R94H | P133A | F146V | |
| E65H | R94Q | R134H | D147Q | |

wherein the first amino acid listed is substituted by the second at the position indicated.

136. A modified IL-6 cytokine, comprising one or more amino acid replacements at one or more target positions in SEQ ID NO: 217 in the IL-6 corresponding to a structurally-related modified amino acid position within the 3-dimensional structure of G-CSF modified cytokines of claim 115, wherein the replacements lead to greater resistance to proteases, as assessed by incubation with a protease or a with a blood lysate or by incubation with serum, compared to the unmodified IL-6.

137. A modified IL-6 cytokine of claim 136, comprising mutations at one or more amino acid residues of IL-6 corresponding to SEQ ID NO: 217 at position 64, 65, 66, 68, 69, 75, 77, 92, 98, 103, 105, 108, 133, 138, 139, 140, 149, 156, 178, and 181, wherein the mutations comprise insertions, deletions and replacements of the native amino acid residue(s).

138. The modified IL-6 cytokine of claim 136, wherein the replacements are selected from the group consisting of amino acid stitutions in SEQ ID NO: 217 corresponding to:

| | | | |
|---|---|---|---|
| P64S | F73I | R103Q | D139N |
| P64A | F73V | E105Q | P140S |
| K65Q | F77I | E105N | P140A |
| K65N | F77V | E105H | K149Q |
| M66V | E92Q | E108Q | K149N |
| M66I | E92N | E108N | W156S |
| E68Q | E92H | E108H | W156H |
| E68N | E98Q | D133Q | R178H |
| E68H | E98N | D133N | R178Q |
| K69Q | E98H | P138S | R181H |
| K69N | R103H | P138A | R181Q, |
| | | D139Q | |

wherein the first amino acid listed is substituted by the second at the position indicated.

139. The modified IFNα-2b cytokine of claim 5 that has increased stability compared to the unmodified cytokine, wherein stability is assessed by measuring residual biological activity to either inhibit viral replication or to stimulate cell proliferation in appropriate cells, after incubation with either mixtures of proteases, individual proteases, blood lysate or serum.

140. The modified IFNα-2b cytokine of claim 5 that has decreased stability compared to the unmodified cytokine, wherein stability is assessed by measuring residual biological activity to either inhibit viral replication in the appropriate cells or to stimulate cell proliferation of the appropriate cells, after incubation with either mixtures of proteases, individual proteases, blood lysate or serum.

141. The modified IFNα-2b cytokine of claim 5 that has increased biological activity compared to the unmodified cytokine, wherein activity is assessed by measuring the capacity to either inhibit viral replication in the appropriate cells or to stimulate cell proliferation of the appropriate cells, after incubation with either mixtures of proteases, individual proteases, blood lysate or serum.

142. The modified IFNα-2a cytokine of claim 47 that has increased stability compared to the unmodified cytokine, wherein stability is assessed by measuring residual biological activity to either inhibit viral replication or to stimulate cell proliferation in appropriate cells, after incubation with either mixtures of proteases, individual proteases, blood lysate or serum.

143. The modified IFNα-2a cytokine of claim 47 that has decreased stability compared to the unmodified cytokine, wherein stability is assessed by measuring residual biological activity to either inhibit viral replication in the appropriate cells or to stimulate cell proliferation of the appropriate cells, after incubation with either mixtures of proteases, individual proteases, blood lysate or serum.

144. The modified IFNα-2a cytokine of claim 47 that has increased biological activity compared to the unmodified cytokine, wherein activity is assessed by measuring the capacity to either inhibit viral replication in the appropriate cells or to stimulate cell proliferation of the appropriate cells, after incubation with either mixtures of proteases, individual proteases, blood lysate or serum.

145. The modified IFNα-c cytokine of claim 49 that has increased stability compared to the unmodified cytokine, wherein stability is assessed by measuring residual biological activity after incubation with either mixtures of proteases, individual proteases, blood lysate or serum.

146. The modified IFNα-c cytokine of claim 49 that has decreased stability compared to the unmodified cytokine, wherein stability is assessed by measuring residual biological activity after incubation with either mixtures of proteases, individual proteases, blood lysate or serum.

147. The modified IFNα-c cytokine of claim 49 that has increased biological activity compared to the unmodified cytokine, after incubation with either mixtures of proteases, individual proteases, blood lysate or serum.

148. The modified IFNα-2c cytokine of claim 51 that has increased stability compared to the unmodified cytokine, wherein stability is assessed by measuring residual biological activity after incubation with either mixtures of proteases, individual proteases, blood lysate or serum.

149. The modified IFNα-2c cytokine of claim 51 that has decreased stability compared to the unmodified cytokine, wherein stability is assessed by measuring residual biological activity after incubation with either mixtures of proteases, individual proteases, blood lysate or serum.

150. The modified IFNα-2c cytokine of claim 51 that has increased biological activity compared to the unmodified cytokine, after incubation with either mixtures of proteases, individual proteases, blood lysate or serum.

151. The modified IFNα-1d cytokine of claim 53 that has increased stability compared to the unmodified cytokine, wherein stability is assessed by measuring residual biological activity after incubation with either mixtures of proteases, individual proteases, blood lysate or serum.

152. The modified IFNα-1d cytokine of claim 53 that has decreased stability compared to the unmodified cytokine, wherein stability is assessed by measuring residual biological activity after incubation with either mixtures of proteases, individual proteases, blood lysate or serum.

153. The modified IFNα-1d cytokine of claim 53 that has increased biological activity compared to the unmodified cytokine, after incubation with either mixtures of proteases, individual proteases, blood lysate or serum.

154. The modified IFNα-5 cytokine of claim 55 that has increased stability compared to the unmodified cytokine, wherein stability is assessed by measuring residual biological activity after incubation with either mixtures of proteases, individual proteases, blood lysate or serum.

155. The modified IFNα-5 cytokine of claim 55 that has decreased stability compared to the unmodified cytokine, wherein stability is assessed by measuring residual biological activity after incubation with either mixtures of proteases, individual proteases, blood lysate or serum.

156. The modified IFNα-5 cytokine of claim 55 that has increased biological activity compared to the unmodified cytokine, after incubation with either mixtures of proteases, individual proteases, blood lysate or serum.

157. The modified IFNα-6 cytokine of claim 57 that has increased stability compared to the unmodified cytokine, wherein stability is assessed by measuring residual biological activity after incubation with either mixtures of proteases, individual proteases, blood lysate or serum.

158. The modified IFNα-6 cytokine of claim 57 that has decreased stability compared to the unmodified cytokine, wherein stability is assessed by measuring residual biological activity after incubation with either mixtures of proteases, individual proteases, blood lysate or serum.

159. The modified IFNα-6 cytokine of claim 57 that has increased biological activity compared to the unmodified cytokine, after incubation with either mixtures of proteases, individual proteases, blood lysate or serum.

160. The modified IFNα-4 cytokine of claim 59 that has increased stability compared to the unmodified cytokine, wherein stability is assessed by measuring residual biological activity after incubation with either mixtures of proteases, individual proteases, blood lysate or serum.

161. The modified IFNα-4 cytokine of claim 59 that has decreased stability compared to the unmodified cytokine, wherein stability is assessed by measuring residual biological activity after incubation with either mixtures of proteases, individual proteases, blood lysate or serum.

162. The modified IFNα-4 cytokine of claim 59 that has increased biological activity compared to the unmodified cytokine, after incubation with either mixtures of proteases, individual proteases, blood lysate or serum.

163. The modified IFNα-4b cytokine of claim 61 that has increased stability compared to the unmodified cytokine, wherein stability is assessed by measuring residual biological activity after incubation with either mixtures of proteases, individual proteases, blood lysate or serum.

164. The modified IFNα-4b cytokine of claim 61 that has decreased stability compared to the unmodified cytokine, wherein stability is assessed by measuring residual biological activity after incubation with either mixtures of proteases, individual proteases, blood lysate or serum.

165. The modified IFNα-4b cytokine of claim 61 that has increased biological activity compared to the unmodified cytokine, after incubation with either mixtures of proteases, individual proteases, blood lysate or serum.

166. The modified IFNα-I cytokine of claim 63 that has increased stability compared to the unmodified cytokine, wherein stability is assessed by measuring residual biological activity after incubation with either mixtures of proteases, individual proteases, blood lysate or serum.

167. The modified IFNα-I cytokine of claim 63 that has decreased stability compared to the unmodified cytokine, wherein stability is assessed by measuring residual biological activity after incubation with either mixtures of proteases, individual proteases, blood lysate or serum.

168. The modified IFNα-I cytokine of claim 63 that has increased biological activity compared to the unmodified cytokine, after incubation with either mixtures of proteases, individual proteases, blood lysate or serum.

169. The modified IFNα-J cytokine of claim 65 that has increased stability compared to the unmodified cytokine, wherein stability is assessed by measuring residual biological activity after incubation with either mixtures of proteases, individual proteases, blood lysate or serum.

170. The modified IFNα-J cytokine of claim 65 that has decreased stability compared to the unmodified cytokine, wherein stability is assessed by measuring residual biological activity after incubation with either mixtures of proteases, individual proteases, blood lysate or serum.

171. The modified IFNα-J cytokine of claim 65 that has increased biological activity compared to the unmodified cytokine, after incubation with either mixtures of proteases, individual proteases, blood lysate or serum.

172. The modified IFNα-H cytokine of claim 67 that has increased stability compared to the unmodified cytokine, wherein stability is assessed by measuring residual biological activity after incubation with either mixtures of proteases, individual proteases, blood lysate or serum.

173. The modified IFNα-H cytokine of claim 67 that has decreased stability compared to the unmodified cytokine, wherein stability is assessed by measuring residual biological activity after incubation with either mixtures of proteases, individual proteases, blood lysate or serum.

174. The modified IFNα-H cytokine of claim 67 that has increased biological activity compared to the unmodified cytokine, after incubation with either mixtures of proteases, individual proteases, blood lysate or serum.

175. The modified IFNα-F cytokine of claim 69 that has increased stability compared to the unmodified cytokine, wherein stability is assessed by measuring residual biological activity after incubation with either mixtures of proteases, individual proteases, blood lysate or serum.

176. The modified IFNα-F cytokine of claim 69 that has decreased stability compared to the unmodified cytokine, wherein stability is assessed by measuring residual biological activity after incubation with either mixtures of proteases, individual proteases, blood lysate or serum.

177. The modified IFNα-F cytokine of claim 69 that has increased biological activity compared to the unmodified cytokine, after incubation with either mixtures of proteases, individual proteases, blood lysate or serum.

178. The modified IFNα-8 cytokine of claim 71 that has increased stability compared to the unmodified cytokine, wherein stability is assessed by measuring residual biological activity after incubation with either mixtures of proteases, individual proteases, blood lysate or serum.

179. The modified IFNα-8 cytokine of claim 71 that has decreased stability compared to the unmodified cytokine, wherein stability is assessed by measuring residual biological activity after incubation with either mixtures of proteases, individual proteases, blood lysate or serum.

180. The modified IFNα-8 cytokine of claim 71 that has increased biological activity compared to the unmodified cytokine, after incubation with either mixtures of proteases, individual proteases, blood lysate or serum.

181. The modified IFNα consensus cytokine of claim 73 that has increased stability compared to any of the aligned cytokines, wherein stability is assessed by measuring residual biological activity after incubation with either mixtures of proteases, individual proteases, blood lysate or serum.

182. The modified IFNα consensus cytokine of claim 73 that has decreased stability compared to any of the aligned cytokines, wherein stability is assessed by measuring residual biological activity after incubation with either mixtures of proteases, individual proteases, blood lysate or serum.

183. The modified IFNα consensus cytokine of claim 73 that has increased biological activity compared to any of the aligned cytokines, after incubation with either mixtures of proteases, individual proteases, blood lysate or serum.

184. The modified IFNβ cytokine of claim 75 that has increased stability compared to the unmodified cytokine, wherein stability is assessed by measuring residual biological activity after incubation with either mixtures of proteases, individual proteases, blood lysate or serum.

185. The modified IFNβ cytokine of claim 75 that has decreased stability compared to the unmodified cytokine, wherein stability is assessed by measuring residual biological activity after incubation with either mixtures of proteases, individual proteases, blood lysate or serum.

186. The modified IFNβ cytokine of claim 75 that has increased biological activity compared to the unmodified cytokine, after incubation with either mixtures of proteases, individual proteases, blood lysate or serum.

187. The modified IFN β-1 cytokine of claim 78 that has increased stability compared to the unmodified cytokine, wherein stability is assessed by measuring residual biological activity after incubation with either mixtures of proteases, individual proteases, blood lysate or serum.

188. The modified IFN β-1 cytokine of claim 78 that has decreased stability compared to the unmodified cytokine, wherein stability is assessed by measuring residual biological activity after incubation with either mixtures of proteases, individual proteases, blood lysate or serum.

189. The modified IFN β-1 cytokine of claim 78 that has increased biological activity compared to the unmodified cytokine, after incubation with either mixtures of proteases, individual proteases, blood lysate or serum.

190. The modified IFN β-2a cytokine of claim 80 that has increased stability compared to the unmodified cytokine, wherein stability is assessed by measuring residual biological activity after incubation with either mixtures of proteases, individual proteases, blood lysate or serum.

191. The modified IFN β-2a cytokine of claim 80 that has decreased stability compared to the unmodified cytokine, wherein stability is assessed by measuring residual biological activity after incubation with either mixtures of proteases, individual proteases, blood lysate or serum.

192. The modified IFN β-2a cytokine of claim 80 that has increased biological activity compared to the unmodified cytokine, after incubation with either mixtures of proteases, individual proteases, blood lysate or serum.

193. The modified IFN-gamma cytokine of claim 82 that has increased stability compared to the unmodified cytokine, wherein stability is assessed by measuring residual biological activity after incubation with either mixtures of proteases, individual proteases, blood lysate or serum.

194. The modified IFN-gamma cytokine of claim 82 that has decreased stability compared to the unmodified cytokine, wherein stability is assessed by measuring residual biological activity after incubation with either mixtures of proteases, individual proteases, blood lysate or serum.

195. The modified IFN-gamma cytokine of claim 82 that has increased biological activity compared to the unmodified cytokine, after incubation with either mixtures of proteases, individual proteases, blood lysate or serum.

196. The modified IL-10 cytokine of claim 85 that has increased stability compared to the unmodified cytokine, wherein stability is assessed by measuring residual biological activity after incubation with either mixtures of proteases, individual proteases, blood lysate or serum.

197. The modified IL-10 cytokine of claim 85 that has decreased stability compared to the unmodified cytokine, wherein stability is assessed by measuring residual biological activity after incubation with either mixtures of proteases, individual proteases, blood lysate or serum.

198. The modified IL-10 cytokine of claim 85 that has increased biological activity compared to the unmodified cytokine, after incubation with either mixtures of proteases, individual proteases, blood lysate or serum.

199. The modified erythropoietin cytokine of claim 88 that has increased stability compared to the unmodified cytokine, wherein stability is assessed by measuring residual biological activity after incubation with either mixtures of proteases, individual proteases, blood lysate or serum.

200. The modified erythropoietin cytokine of claim 88 that has decreased stability compared to the unmodified cytokine, wherein stability is assessed by measuring residual biological activity after incubation with either mixtures of proteases, individual proteases, blood lysate or serum.

201. The modified erythropoietin cytokine of claim 88 that has increased biological activity compared to the unmodified cytokine, after incubation with either mixtures of proteases, individual proteases, blood lysate or serum.

202. The modified GM-CSF cytokine of claim 91 that has increased stability compared to the unmodified cytokine, wherein stability is assessed by measuring residual biological activity after incubation with either mixtures of proteases, individual proteases, blood lysate or serum.

203. The modified GM-CSF cytokine of claim 91 that has decreased stability compared to the unmodified cytokine, wherein stability is assessed by measuring residual biological activity after incubation with either mixtures of proteases, individual proteases, blood lysate or serum.

204. The modified GM-CSF cytokine of claim 91 that has increased biological activity compared to the unmodified cytokine, after incubation with either mixtures of proteases, individual proteases, blood lysate or serum.

205. The modified Flt3 ligand cytokine of claim 94 that has increased stability compared to the unmodified cytokine, wherein stability is assessed by measuring residual biological activity after incubation with either mixtures of proteases, individual proteases, blood lysate or serum.

206. The modified Flt3 ligand cytokine of claim 94 that has decreased stability compared to the unmodified cytokine, wherein stability is assessed by measuring residual biological activity after incubation with either mixtures of proteases, individual proteases, blood lysate or serum.

207. The modified Flt3 ligand cytokine of claim 94 that has increased biological activity compared to the unmodified cytokine, after incubation with either mixtures of proteases, individual proteases, blood lysate or serum.

208. The modified IL-2 cytokine of claim 97 that has increased stability compared to the unmodified cytokine, wherein stability is assessed by measuring residual biological activity after incubation with either mixtures of proteases, individual proteases, blood lysate or serum.

209. The modified IL-2 cytokine of claim 97 that has decreased stability compared to the unmodified cytokine, wherein stability is assessed by measuring residual biological activity after incubation with either mixtures of proteases, individual proteases, blood lysate or serum.

210. The modified IL-2 cytokine of claim 97 that has increased biological activity compared to the unmodified cytokine, after incubation with either mixtures of proteases, individual proteases, blood lysate or serum.

211. The modified IL-3 cytokine of claim 100 that has increased stability compared to the unmodified cytokine, wherein stability is assessed by measuring residual biological activity after incubation with either mixtures of proteases, individual proteases, blood lysate or serum.

212. The modified IL-3 cytokine of claim 100 that has decreased stability compared to the unmodified cytokine, wherein stability is assessed by measuring residual biological activity after incubation with either mixtures of proteases, individual proteases, blood lysate or serum.

213. The modified IL-3 cytokine of claim 100 that has increased biological activity compared to the unmodified cytokine, after incubation with either mixtures of proteases, individual proteases, blood lysate or serum.

214. The modified SCF cytokine of claim 103 that has increased stability compared to the unmodified cytokine, wherein stability is assessed by measuring residual biological activity after incubation with either mixtures of proteases, individual proteases, blood lysate or serum.

215. The modified SCF cytokine of claim 103 that has decreased stability compared to the unmodified cytokine, wherein stability is assessed by measuring residual biological activity after incubation with either mixtures of proteases, individual proteases, blood lysate or serum.

216. The modified SCF cytokine of claim 103 that has increased biological activity compared to the unmodified cytokine, after incubation with either mixtures of proteases, individual proteases, blood lysate or serum.

217. The modified IL-4 cytokine of claim 106 that has increased stability compared to the unmodified cytokine, wherein stability is assessed by measuring residual biological activity after incubation with either mixtures of proteases, individual proteases, blood lysate or serum.

218. The modified IL-4 cytokine of claim 106 that has decreased stability compared to the unmodified cytokine, wherein stability is assessed by measuring residual biological activity after incubation with either mixtures of proteases, individual proteases, blood lysate or serum.

219. The modified IL-4 cytokine of claim 106 that has increased biological activity compared to the unmodified cytokine, after incubation with either mixtures of proteases, individual proteases, blood lysate or serum.

220. The modified IL-5 cytokine of claim 109 that has increased stability compared to the unmodified cytokine, wherein stability is assessed by measuring residual biological activity after incubation with either mixtures of proteases, individual proteases, blood lysate or serum.

221. The modified IL-5 cytokine of claim 109 that has decreased stability compared to the unmodified cytokine, wherein stability is assessed by measuring residual biological activity after incubation with either mixtures of proteases, individual proteases, blood lysate or serum.

222. The modified IL-5 cytokine of claim 109 that has increased biological activity compared to the unmodified cytokine, after incubation with either mixtures of proteases, individual proteases, blood lysate or serum.

223. The modified IL-13 cytokine of claim 112 that has increased stability compared to the unmodified cytokine, wherein stability is assessed by measuring residual biological activity after incubation with either mixtures of proteases, individual proteases, blood lysate or serum.

224. The modified IL-13 cytokine of claim 112 that has decreased stability compared to the unmodified cytokine, wherein stability is assessed by measuring residual biological activity after incubation with either mixtures of proteases, individual proteases, blood lysate or serum.

225. The modified IL-13 cytokine of claim 112 that has increased biological activity compared to the unmodified cytokine, after incubation with either mixtures of proteases, individual proteases, blood lysate or serum.

226. The modified G-CSF cytokine of claim 115 that has increased stability compared to the unmodified cytokine, wherein stability is assessed by measuring residual biological activity after incubation with either mixtures of proteases, individual proteases, blood lysate or serum.

227. The modified G-CSF cytokine of claim 115 that has decreased stability compared to the unmodified cytokine, wherein stability is assessed by measuring residual biological activity after incubation with either mixtures of proteases, individual proteases, blood lysate or serum.

228. The modified G-CSF cytokine of claim 115 that has increased biological activity compared to the unmodified cytokine, after incubation with either mixtures of proteases, individual proteases, blood lysate or serum.

229. The modified leptin cytokine of claim 118 that has increased stability compared to the unmodified cytokine, wherein stability is assessed by measuring residual biological activity after incubation with either mixtures of proteases, individual proteases, blood lysate or serum.

230. The modified leptin cytokine of claim 118 that has decreased stability compared to the unmodified cytokine, wherein stability is assessed by measuring residual biological activity after incubation with either mixtures of proteases, individual proteases, blood lysate or serum.

231. The modified leptin cytokine of claim 118 that has increased biological activity compared to the unmodified cytokine, after incubation with either mixtures of proteases, individual proteases, blood lysate or serum.

232. The modified CNTF cytokine of claim 121 that has increased stability compared to the unmodified cytokine, wherein stability is assessed by measuring residual biological activity after incubation with either mixtures of proteases, individual proteases, blood lysate or serum.

233. The modified CNTF cytokine of claim 121 that has decreased stability compared to the unmodified cytokine, wherein stability is assessed by measuring residual biological activity after incubation with either mixtures of proteases, individual proteases, blood lysate or serum.

234. The modified CNTF cytokine of claim 121 that has increased biological activity compared to the unmodified cytokine, after incubation with either mixtures of proteases, individual proteases, blood lysate or serum.

235. The modified LIF cytokine of claim 124 that has increased stability compared to the unmodified cytokine, wherein stability is assessed by measuring residual biological activity after incubation with either mixtures of proteases, individual proteases, blood lysate or serum.

236. The modified LIF cytokine of claim 124 that has decreased stability compared to the unmodified cytokine, wherein stability is assessed by measuring residual biological activity after incubation with either mixtures of proteases, individual proteases, blood lysate or serum.

237. The modified LIF cytokine of claim 124 that has increased biological activity compared to the unmodified cytokine, after incubation with either mixtures of proteases, individual proteases, blood lysate or serum.

238. The modified oncostatin M cytokine of claim 127 that has increased stability compared to the unmodified cytokine, wherein stability is assessed by measuring residual biological activity after incubation with either mixtures of proteases, individual proteases, blood lysate or serum.

239. The modified oncostatin M cytokine of claim 127 that has decreased stability compared to the unmodified cytokine, wherein stability is assessed by measuring residual biological activity after incubation with either mixtures of proteases, individual proteases, blood lysate or serum.

240. The modified oncostatin M cytokine of claim 127 that has increased biological activity compared to the unmodified cytokine, after incubation with either mixtures of proteases, individual proteases, blood lysate or serum.

241. The modified IL-12 cytokine of claim 130 that has increased stability compared to the unmodified cytokine, wherein stability is assessed by measuring residual biological activity after incubation with either mixtures of proteases, individual proteases, blood lysate or serum.

242. The modified IL-12 cytokine of claim 130 that has decreased stability compared to the unmodified cytokine, wherein stability is assessed by measuring residual biological activity after incubation with either mixtures of proteases, individual proteases, blood lysate or serum.

243. The modified IL-12 cytokine of claim 130 that has increased biological activity compared to the unmodified cytokine, after incubation with either mixtures of proteases, individual proteases, blood lysate or serum.

244. The modified hGH of claim 133 that has increased stability compared to the unmodified cytokine, wherein stability is assessed by measuring residual biological activity after incubation with either mixtures of proteases, individual proteases, blood lysate or serum.

245. The modified hGH of claim 133 that has decreased stability compared to the unmodified cytokine, wherein stability is assessed by measuring residual biological activity after incubation with either mixtures of proteases, individual proteases, blood lysate or serum.

246. The modified hGH of claim 133 that has increased biological activity compared to the unmodified cytokine, after incubation with either mixtures of proteases, individual proteases, blood lysate or serum.

247. The modified IL-6 cytokine of claim 136 that has increased stability compared to the unmodified cytokine, wherein stability is assessed by measuring residual biological activity after incubation with either mixtures of proteases, individual proteases, blood lysate or serum.

248. The modified IL-6 cytokine of claim 136 that has decreased stability compared to the unmodified cytokine, wherein stability is assessed by measuring residual biological activity after incubation with either mixtures of proteases, individual proteases, blood lysate or serum.

249. The modified IL-6 cytokine of claim 136 that has increased biological activity compared to the unmodified cytokine, after incubation with either mixtures of proteases, individual proteases, blood lysate or serum.

250. A method for generating a protein or peptide molecule, having a predetermined property or activity, the method comprising:
(a) identifying, within a target protein or peptide or plurality thereof, one or more target amino acids, wherein:
each target amino acid is designated an in silico-HIT (is-HIT); and
the is-HIT target amino acids are determined by identifying structurally homologous loci between the evolving target protein and a reference protein possessing the desired activity;
(b) identifying one or more replacement amino acids, specific for each is-HIT, wherein each single amino acid replacement within the target protein or peptide is designated as a candidate LEAD protein;
(c) producing a population of sets of nucleic acid molecules that encode each of the candidate LEAD proteins, wherein each candidate LEAD protein contains a single amino acid replacement, and wherein each polynucleotide in a set encodes a candidate LEAD protein that differs by one amino acid from the target protein or peptide;
(d) introducing each set of nucleic acid molecules into host cells and expressing the encoded candidate LEAD proteins, wherein the host cells are present in an addressable array;
(e) individually screening the sets of encoded candidate LEAD proteins to identify one or more proteins that has an activity that differs from an activity an unmodified target protein, wherein each such protein is designated a LEAD mutant protein;

251. The method of claim 250, wherein the predetermined property or activity of the evolved modified protein is increased resistance to proteolysis.

252. The method of claim 250, wherein the target proteins comprise a family.

253. The method of claim 250, wherein target proteins are cytokines.

254. The method of claim 253, wherein the cytokines are selected from the group consisting of interleukin-10 (IL-10), interferon beta (IFNβ), interferon alpha (IFNα), interferon gamma (IFN-y), granulocyte colony stimulating factor (G-CSF), leukemia inhibitory factor (LIF), human growth hormone (hGH), ciliary neurotrophic factor (CNTF), leptin, oncostatin M, interleukin-6 (IL-6) and interleukin-12 (IL-12), erythropoietin (EPO), granulocyte-macrophage colony stimulating factor (GM-CSF), interleukin-2 (IL-2), interleukin-3 (IL-3), interleukin-4 (IL-4), interleukin-5 (IL-5), interleukin-13 (IL-13), Flt3 ligand and stem cell factor (SCF).

255. The method of claim 250, wherein each candidate lead is individually prepared and screened to identify leads.

256. The method of claim 250, wherein the nucleic acid molecules comprise plasmids; and the cells are eukaryotic cells that are transfected with the plasmids, or the nucleic acid molecules comprise plasmids and the cells are bacterial cells.

257. The method of claim 250, wherein the nucleic acid molecules in step (c) are produced by site-specific mutagenesis.

258. The method of claim 250, further comprising:
(e) generating a population of sets of nucleic acid molecules encoding a set of candidate super-LEAD proteins, wherein each candidate super-LEAD protein comprises a combination of two or more of the single amino acid mutations derived from two or more LEAD mutant proteins;
(f) introducing each set of nucleic acid molecules encoding candidate super-LEADs into cells and expressing the encoded candidate super-LEAD proteins; and
(g) individually screening the sets of encoded candidate super-LEAD proteins to identify one or more proteins that has activity that differs from the unmodified target protein and has properties that differ from the original LEADs, wherein each such protein is designated a super-LEAD.

259. The method of claim 258, wherein the nucleic acid molecules in step (f) are generated by a method selected from among additive directional mutagenesis (ADM), multi-overlapped primer extensions, oligonucleotide-mediated mutagenesis, nucleic acid shuffling, recombination, site-specific mutagenesis, and de novo synthesis.

260. The method of claim 250, wherein candidate leads are produced by replacing to a restricted subset of amino acids along the full length of a target protein.

261. The method of claim 250, wherein the replacement amino acids identified in step (b) correspond to a restricted subset of the 19 remaining non-native amino acids.

262. The method of claim 250, wherein the nucleic acids of step (c) are produced by systematically replacing each codon that is an is-HIT, with one or more codons encoding a restricted subset of the remaining amino acids, to produce nucleic acid molecules each differing by at least one codon and encoding candidate LEADs.

263. The method of claim 258, wherein the number of LEAD amino acid positions generated on a single nucleic acid molecule is selected from the group consisting of: two, three, four, five, six, seven, eight, nine, ten or more LEAD amino acid positions up to all of the LEAD amino acid positions.

264. The method of claim 250, wherein the LEADs or super-LEADs possess increased resistance to proteolysis compared to unmodified target protein.

265. The method of claim 250, wherein the change in activity is at least about 10%, 20%, 30%, 40%, 50%, 60%, 70%, 80%, 90% or 100% compared to the activity of the unmodified target protein.

266. The method of claim 250, wherein the change in activity is not more than about 10%, 20%, 30%, 40%, 50%, 60%, 70%, 80%, 90% or 100% compared to he activity of the unmodified target protein.

267. The method of claim 250, wherein the change in activity is at least about 2 times, 3 times, 4 times, 5 times, 6 times, 7 times, 8 times, 9 times, 10 times, 20 times, 30 times, 40 times, 50 times, 60 times, 70 times, 80 times, 90 times, 100 times, 200 times, 300 times, 400 times, 500 times, 600 times, 700 times, 800 times, 900 times, 1000 times, or more greater than the activity of the unmodified target protein.

268. The method of claim 250, wherein the replacing amino acids are selected using Percent Accepted Mutations (PAM) matrices.

269. The method of claim 250, wherein the replacing amino acids are pseudo-wild type amino acids.

270. The method of claim 250, wherein identification of the structurally homologous loci between the evolving target protein and a reference protein possessing the desired activity, comprises:
(a) comparing the 3-dimensional structures of the two or more proteins to identify regions of high coincidence between their backbones, said regions designated as structurally homologous regions; and
(b) identifying is-HIT structurally homologous loci on the evolving protein that correspond to structurally related is-HIT amino acid positions within a structurally homologous region of the reference protein.

271. The method of claim 270, wherein the comparison of the 3-dimensional structures of the evolving target protein and the reference protein is based upon their 3-dimensinal strucutures not upon alignment between their respective primary sequences.

272. The method of claim 270, wherein the evolving target protein and the reference protein belong to a family of sequence-related proteins.

273. The method of claim 270, wherein the evolving target protein and the reference protein belong respectively are non-related proteins or sequence-non-related proteins.

274. The method of claim 270, wherein the degree of coincidence between the 3-dimensional structures of the evolving target protein and the reference protein is in a region selected from the group consisting of:
(a) a small region on the two proteins;
(b) a large region on the two proteins; and
(c) a region that covers the full length of one or both of the proteins.

275. The method of claim 270, wherein the degree of coincidence between the 3-dimensional structures of the evolving target protein and of the reference protein is determined by superposition and RMS deviation calculations using any combination of one or more of the peptide backbone atoms selected from the group consisting of: N, C, C(C═O), O and CA.

276. The method of claim 275, wherein the superposition and RMS deviation calculations are made using all of the peptide backbone atoms selected from the group consisting of: N, C, C(C═O), O and CA, when present.

277. The method of claim 275, wherein the superposition and RMS deviation calculations are carried out on a subset of regions or domains of a larger protein that adopts a structure similar to a smaller protein.

278. The method of claim 275, wherein the degree of coincidence between the 3-dimensional structures of the evolving target protein and the reference protein is obtained using any combination of one or more of either Class Architecture, Topology and Homologous Superfamily (CATH); Combinatorial Extension of the optimal path (CE); Fold Classification based of Structure-Structure Alignment of Proteins (FSSP); Structural Classification of Proteins (SCOP); Vector Alignment Search Tool (VAST), and TOP.

279. A modified cytokine of claim 1 selected from the group consisting of modified cytokines comprising a sequence of amino acids set forth in any of SEQ ID Nos. 2-181, 233-1303 or a structural homolog thereof.

280. The modified cytokine of claim 279, selected from the group consisting of interleukin-10 (IL-10), interferon α, interferon β, interferon y, granulocyte colony stimulating factor (G-CSF), leukemia inhibitory factor (LIF), human growth hormone (hGH), ciliary neurotrophic factor (CNTF), leptin, oncostatin M, interleukin-6 (IL-6) and interleukin-12 (IL-12), erythropoietin (EPO), granulocyte-macrophage colony stimulating factor (GM-CSF), interleukin-2 (IL-2), interleukin-3 (IL-3), interleukin-4 (IL-4), interleukin-5 (IL-5), interleukin-13 (IL-13), Flt3 ligand and stem cell factor (SCF).

281. A method of generating a modified protein or cytokine having a pre-selected altered phenotype, comprising:
modifying a first protein or cytokine by a directed evolution method to produce an evolved protein or cytokine that has the altered phenotype to identify altered loci; and
comparing the structures of one or more members of the protein or cytokine family to identify structurally homologous loci for alteration;
altering the identified loci in members of the protein or cytokine family to produce proteins or cytokines that have the altered phenotype.

282. The method of claim 281, wherein directed evolution is effected by a rational directed evolution method.

283. The method of claim 281, wherein directed evolution is effected by a 2-dimensional rational scanning.

284. The method of claim 281, wherein identification of the structurally homologous loci between the evolved protein or cytokine and members of the protein or cytokine family, further comprises:
(a) comparing the 3-dimensional structures of the evolved protein or cytokine with one or more members of the protein or cytokine family to identify regions of high coincidence between their backbones, said regions designated as structurally homologous regions; and
(b) identifying is-HIT structurally homologous loci on the members of the protein or cytokine family that correspond to structurally related is-HIT amino acid positions within a structurally homologous region of the evolved protein or cytokine.

285. The method of claim 284, wherein the comparison of the 3-dimensional structures of the members of the protein or cytokine family and the evolved protein or cytokine is made irrespective of any alignment between their respective sequences.

286. The method of claim 284, wherein the degree of coincidence between the 3-dimensional structures of the members of the protein or cytokine family and the evolved protein or cytokine is in a region selected from the group consisting of:
(a) a small region on the two proteins;
(b) a large region on the two proteins; and
(c) a region that covers the full length of one or both of the proteins.

287. The method of claim 284, wherein the degree of coincidence between the 3-dimensional structures of the members of the protein or cytokine family and of the evolved protein or cytokine is determined by superposition and RMS deviation calculations using any combination of one or more of the peptide backbone atoms selected from the group consisting of: N, C, C(C═O), O and CA.

288. The method of claim 287, wherein the superposition and RMS deviation calculations are made using all of the peptide backbone atoms present selected from group the consisting of: N, C, C(C═O), O and CA.

289. The method of claim 287, wherein the superposition and RMS deviation calculations are carried out on a subset of regions or domains of a larger protein that adopts a structure similar to a smaller protein.

290. The method of claim 284, wherein the degree of coincidence between the 3-dimensional structures of the members of the protein or cytokine family and the evolved protein or cytokine is obtained using any combination of one or more of either CATH (Class Architecture, Topology and Homologous Superfamily); CE (Combinatorial Extension of the optimal path); FSSP (Fold Classification based of Structure-Structure Alignment of Proteins); SCOP (Structural Classification of Proteins); VAST (Vector Alignment Search Tool), and TOP.

291. The method of claim 283, wherein the 2-dimensional rational scanning method comprises:
(a) identifying, within the first protein or cytokine, one or more target amino acids amenable to providing the altered phenotype upon amino acid replacement, wherein each target amino acid is designated an in silico-HIT (is-HIT);
(b) identifying one or more replacement amino acids, specific for each is-HIT, amenable to providing the altered phenotype upon amino acid replacement, wherein each single amino acid replacement within the protein or cytokine is designated as a candidate LEAD protein;
(c) producing a population of sets of nucleic acid molecules that encode each of the candidate LEAD proteins, wherein each candidate LEAD protein comprises a single amino acid replacement, and wherein each polynucleotide in a set encodes a candidate LEAD protein that differs by one amino acid from the unmodified protein or cytokine;
(d) introducing each set of nucleic acid molecules into host cells and expressing the encoded candidate LEAD proteins, wherein the host cells are present in an addressable array;
(e) individually screening the sets of encoded candidate LEAD proteins to identify one or more candidate LEAD proteins that has activity that differs from the unmodified protein or cytokine, wherein each such protein is designated a LEAD mutant protein.

292. The method of claim 291, wherein the array comprises a solid support with wells; and each well contains one set of cells.

293. The method of claim 291, wherein the nucleic acid molecules comprise plasmids; and the cells are eukaryotic cells that are transfected with the plasmids.

294. The method of claim 291, wherein the nucleic acid molecules comprise plasmids and the cells are bacterial cells.

295. The method of claim 291, wherein the nucleic acid molecules in step (c) are produced by site-specific mutagenesis.

296. The method of claim 291, further comprising:
(f) generating a population of sets of nucleic acid molecules encoding a set of candidate super-LEAD proteins, wherein each candidate super-LEAD protein comprises a combination of two or more of the single amino acid mutations derived from two or more LEAD mutant proteins;
(g) introducing each set of nucleic acid molecules encoding candidate super-LEADs into cells and expressing the encoded candidate super-LEAD proteins; and
(h) individually screening the sets of encoded candidate super-LEAD proteins to identify one or more proteins that has activity that differs from the unmodified protein or cytokine and has properties that differ from the original LEADs, wherein each such protein is designated a super-LEAD.

297. The method of claim 296, wherein the nucleic acid molecules in step (f) are produced by a method selected from among Additive Directional Mutagenesis (ADM), multi-overlapped primer extensions, oligonucleotide-mediated mutagenesis, nucleic acid shuffling, recombination, site-specific mutagenesis, and de novo synthesis.

298. The method of claim 291, wherein the is-HITs identified in step (a) correspond to a restricted subset of amino acids along the full length target protein.

299. The method of claim 291, wherein the replacement amino acids identified in step (b) correspond to a restricted subset of the 19 remaining non-native amino acids.

300. The method of claim 291, wherein the nucleic acids of step (c) are produced by systematically replacing each codon that is an is-HIT, with one or more codons encoding a restricted subset of the remaining amino acids, to produce nucleic acid molecules each differing by at least one codon and encoding candidate LEADs.

301. The method of claim 296, wherein the number of LEAD amino acid positions generated on a single nucleic acid molecule is selected from the group consisting of: two, three, four, five, six, seven, eight, nine, ten or more LEAD amino acid positions up to all of the LEAD amino acid positions.

302. The method of claim 291, wherein the LEADs or super-LEADs possess increased resistance to proteolysis compared to unmodified protein or cytokine.

303. The method of claim 291, wherein the change in activity is at least about 10%, 20%, 30%, 40%, 50%, 60%, 70%, 80%, 90% or 100% of the activity of the unmodified target protein.

304. The method of claim 291, wherein the change in activity is not more than about 10%, 20%, 30%, 40%, 50%, 60%, 70%, 80%, 90% or 100%, of the activity of the unmodified target protein.

305. The method of claim 291, wherein the change in activity is at least about 2 times, 3 times, 4 times, 5 times, 6 times, 7 times, 8 times, 9 times, 10 times, 20 times, 30 times, 40 times, 50 times, 60 times, 70 times, 80 times, 90 times, 100 times, 200 times, 300 times, 400 times, 500 times, 600 times, 700 times, 800 times, 900 times, 1000 times, or more greater or less than the activity of the unmodified target protein.

306. A modified cytokine of claim 1 that is an IFNα-2b, IFNα-2a, IFN-2c cytokine selected from the group consisting of proteins comprising one or more single amino acid replacements corresponding to the replacement of: N by D at position 45; D by G at position 94; G by R at position 102; A by G at position 139; or any combination thereof.

307. A modified cytokine of claim 1 that is an IFNα-2b, IFNα-2a, IFN-2c cytokine selected from selected from the group consisting of proteins comprising one or more single amino acid replacements in any of SEQ ID Nos. 1, 182, 185 or 232 or any combination thereof corresponding to the replacement: L by V at position 3; L by I at position 3; P by S at position 4; P by by S at position 4; P by A at position 4; R by H at position 12; R by Q at position 12; R by H at position 13; R by Q at position 13; M by V at position 16; M by I at position 16; R by H at position 22; R by Q at position 22; R or K by H at position 23; R or K by Q at position 23; F by I at position 27; F by V at position 27; L by V at position 30; L by I at position 30; K by Q at position 31; K by T at position 31; R by H at position 33; R by Q at position 33; E by Q at position 41; E by H at position 41; K by Q at position 49; K by T at position 49; E by Q at position 58; E by H at position 58; K by Q at position 70; K by T at position 70; E by Q at position 78; E by H at position 78; K by Q at position 83; K by T at position 83; Y by H at position 89; Y by I at position 89; E by Q at position 96; E by H at position 96; E by Q at position 107; E by H at position 107; P by S at position 109; P by A at position 109; L by V at position 110; L by I at position 110; M by V at position 111; M by I at position 111; E by Q at position 113; E by H at position 113; L by V at position 117; L by I at position 117; R by H at position 120; R by Q at position 120; K by Q at position 121; K by T at position 121; R by H at position 125; R by Q at position 125; L by V at position 128; L by I at position 128; K by Q at position 131; K by T at position 131; E by Q at position 132; E by H at position 132; K by Q at position 133; K by T at position 133; K by Q at position 134; K by T at position 134; Y by H at position 135; Y by I at position 135; P by S at position 137; P by A at position 137; M by V at position 148; M by I at position 148; R by H at position 149; R by Q at position 149; E by Q at position 159; E by H at position 159; L by V at position 161; L by I at position 161; R by H at position 162; R by Q at position 162; K by Q at position 164; K by T at position 164; E by Q at position 165; and E by H at position 165 or any combination thereof, wherein residue 1 corresponds to residue 1 of the mature IFNα-2b or IFNα-2a cytokine set forth in SEQ ID NOS:1 or 182.

308. A modified cytokine of claim 1 that is an IFNα-2b, IFNα-2a, IFN-2c cytokine selected from selected from the group consisting of proteins comprising one or more single amino acid replacements in any of SEQ ID Nos. 1, 182, 185 or 232 or any combination thereof corresponding to the replacement L by V at position 3; L by I at position 3; P by S at position 4; P by A at position 4; R by H at position 12; R by Q at position 12; R by H at position 13; R by Q at position 13; M by V at position 16; M by I at position 16; R by H at position 22; R by Q at position 22; R or K by H at position 23; R or K by Q at position 23; F by I at position 27; F by V at position 27; L by V at position 30; L by I at position 30; K by Q at position 31; K by T at position 31; R by H at position 33; R by Q at position 33; E by Q at position 41; E by H at position 41; K by Q at position 49; K by T at position 49; E by Q at position 58; E by H at position 58; K by Q at position 70; K by T at position 70; E by Q at position 78; E by H at position 78; K by Q at position 83; K by T at position 83; Y by H at position 89; Y by I at position 89; E by Q at position 96; E by H at position 96; E by Q at position 107; E by H at position 107; P by S at position 109; P by A at position 109; L by V at position 110; L by I at position 110; M by V at position 111; M by I at position 111; E by Q at position 113; E by H at position 113; L by V at position 117; L by I at position 117; R by H at position 120; R by Q at position 120; K by Q at position 121; K by T at position 121; R by H at position 125; R by Q at position 125; L by V at position 128; L by I at position 128; K by Q at position 131; K by T at position 131; E by Q at position 132; E by H at position 132; K by Q at position 133; K by T at position 133; K by Q at position 134; K by T at position 134; Y by H at position 135; Y by I at position 135; P by S at position 137; P by A at position 137; M by V at position 148; M by I at position 148; R by H at position 149; R by Q at position 149; E by Q at position 159; E by H at position 159; L by V at position 161; L by I at position 161; R by H at position 162; R by Q at position 162; K by Q at position 164; K by T at position 164; E by Q at position 165; E by H at position 165; N by D at position 45; D by G at position 94; G by R at position 102; and A by G at position 139, wherein residue 1 corresponds to residue 1 of the mature IFNα-2b or IFNα-2a cytokine set forth in SEQ ID No. 1 or 182.

309. The modified cytokine of claim 1, that is an interferon β (IFNβ).

310. A modified IFN β cytokine of claim 309 selected from the group consisting of proteins comprising one or more single amino acid replacements in SEQ ID NOS:196, corresponding to the replacement of M by V at position 1, M by I at position 1, M by T at position 1, M by Q at position 1, M by A at position 1, L by V at position 5, L by I at position 5, L by T at position 5, L by Q at position 5, L by H at position 5, L by A at position 5, F by I at position 8, F by V at position 8, L by V at position 9, L by I at position 9, L by T at position 9, L by Q at position 9, L by H at position 9, L by A at position 9, R by H at position 11, R by Q at position 11, F by I at position 15, F by V at position 15, K by Q at position 19, K by T at position 19, K by S at position 19, K by H at position 19, W by S at position 22, W by H at position 22, N by H at position 25, N by S at position 25, N by Q at position 25, R by H position 27, R by Q position 27, L by V at position 28, L by I at position 28, L by T at position 28, L by Q at position 28, L by H at position 28, L by A at position 28, E by Q at position 29, E by H at position 29, Y by H at position 30, Y by I at position 30, L by V at position 32, L by I at position 32, L by T at position 32, L by Q at position 32, L by H at position 32, L by A at position 32, K by Q at position 33, K by T at position 33, K by S at position 33, K by H at position 33, R by H at position 35, R by Q at position 35, M by V at position 36, M by I at position 36, M by T at position 36, M by Q at position 36, M by A at position 36, D by Q at position 39, D by H at position 39, D by G at position 39, E by Q at position 42, E by H at position 42, K by Q at position 45, K by T at position 45, K by S at position 45, K by H at position 45, L by V at position 47, L by I at position 47, L by T at position 47, L by, Q at position 47, L by H at position 47, L by A at position 47, K by Q at position 52, K by T at position 52, K by S at position 52, K by H at position 52, F by I at position 67, F by V at position 67, R by H at position 71, R by Q at position 71, D by Q at position 73, D by H at position 73, D by G at position 73, E by Q at position 81, E by H at position 81, E by Q at position 85, E by H at position 85, Y by H at position 92, Y by I at position 92, K by Q at position 99, K by T at position 99, K by S at position 99, K by H at position 99, E by Q at position 103, E by H at position 103, E by Q at position 104, E by H at position 104, K by Q at position 105, K by T at position 105, K by S at position 105, K by H at position 105, E by Q at position 107, E by H at position 107, K by Q at position 108, K by T at position 108, K by S at position 108, K by H at position 108, E by Q at position 109, E by H at position 109, D by Q at position 110, D by H at position 110, D by G at position 110, F by I at position 111, F by V at position 111, R by H at position 113, R by Q at position 113, L by V at position 116, L by I at position 116, L by T at position 116, L by Q at position 116, L by H at position 116, L by A at position 116, L by V at position 120, L by I at position 120, L by T at position 120, L by Q at position 120, L by H at position 120, L by A at position 120, K by Q at position 123, K by T at position 123, K by S at position 123, K by H at position 123, R by H at position 124, R by Q at position 124, R by H at position 128, R by Q at position 128, L by V at position 130, L by I at position 130, L by T at position 130, L by Q at position 130, L by H at position 130, L by A at position 130, K by Q at position 134, K by T at position 134, K by S at position 134, K by H at position 134, K by Q at position 136, K by T at position 136, K by S at position 136, K by H at position 136, E by Q at position 137, E by H at position 137, Y by H at position 138, Y by I at position 138, R by H at position 152, R by Q at position 152, Y by H at position 155, Y by I at position 155, R by H at position 159, R by Q at position 159, Y by H at position 163, Y by I at position 163, R by H at position 165, R by Q at position 165, M by D at position 1, M by E at position 1, M by K at position 1, M by N at position 1, M by R at position 1, M by S at position 1, L by D at position 5, L by E at position 5, L by K at position 5, L by N at position 5, L by R at position 5, L by S at position 5, L by D at position 6, L by E at position 6, L by K at position 6, L by N at position 6, L by R at position 6, L by S at position 6, L by Q at position 6, L by T at position 6, F by E at position 8, F by K at position 8, F by R at position 8, F by D at position 8, L by D at position 9, L by E at position 9, L by K at position 9, L by N at position 9, L by R at position 9, L by S at position 9, Q by D at position 10, Q by E at position 10, Q by K at position 10, Q by N at position 10, Q by R at position 10, Q by S at position 10, Q by T at position 10, S by D at position 12, S by E at position 12, S by K at position 12, S by R at position 12, S by D at position 13, S by E at position 13, S by K at position 13, S by R at position 13, S by N at position 13, S by Q at position 13, S by T at position 13, N by D at position 14, N by E at position 14, N by K at position 14, N by Q at position 14, N by R at position 14, N by S at position 14, N by T at position 14, F by D at position 15, F by E at position 15, F by K at position 15, F by R at position 15, Q by D at position 16, Q by E at position 16, Q by K at position 16, Q by N at position 16, Q by R at position 16, Q by S at position 16, Q by T at position 16, C by D at position 17, C by E at position 17, C by K at position 17, C by N at position 17, C by Q at position 17, C by R at position 17, C by S at position 17, C by T at position 17, L by N at position 20, L by Q at position 20, L by R at position 20, L by S at position 20, L by T at position 20, L by D at position 20, L by E at position 20, L by K at position 20, W by D at position 22, W by E at position 22, W by K at position 22, W by R at position 22, Q by D at position 23, Q by E at position 23, Q by K at position 23, Q by R at position 23, L by D at position 24, L by E at position 24, L by K at position 24, L by R at position 24, W by D at position 79, W by E at position 79, W by K at position 79, W by R at position 79, N by D at position 80, N by E at position 80, N by K at position 80, N by R at position 80, T by D at position 82, T by E at position 82, T by K at position 82, T by R at position 82, I by D at position 83, I by E at position 83, I by K at position 83, I by R at position 83, I by N at position 83, I by Q at position 83, I by S at position 83, I by T at position 83, N by D at position 86, N by E at position 86, N by K at position 86, N by R at position 86, N by Q at position 86, N by S at position 86, N by T at position 86, L by D at position 87, L by E at position 87, L by K at position 87, L by R at position 87, L by N at position 87, L by Q at position 87, L by S at position 87, L by T at position 87, A by D at position 89, A by E at position 89, A by K at position 89, A by R at position 89, N by D at position 90, N by E at position 90, N by K at position 90, N by Q at position 90, N by R at position 90, N by S at position 90, N by T at position 90, V by D at position 91, V by E at position 91, V by K at position 91, V by N at position 91, V by Q at position 91, V by R at position 91, V by S at position 91, V by T at position 91, Q by D at position 94, Q by E at position 94, Q by Q at position 94, Q by N at position 94, Q by R at position 94, Q by S at position 94, Q by T at position 94, I by D at position 95, I by E at position 95, I by K at position 95, I by N at position 95, I by Q at position 95, I by R at position 95, I by S at position 95, I by T at position 95, H by D at position 97, H by E at position 97, H by K at position 97, H by N at position 97, H by Q at position 97, H by R at position 97, H by S at position 97, H by T at position 97, L by D at position 98, L by E at position 98, L by K at position 98, L by N at position 98, L by Q at position 98, L by R at position 98, L by S at position 98, L by T at position 98, V by D at position 101, V by E at position 101, V by K at position 101, V by N at position 101, V by Q at position 101, V by R at position 101, V by S at position 101, V by T at position 101, M by C at position 1, L by C at position 6, Q by C at position 10, S by C at position 13, Q by C at position 16, L by C at position 17, V by C at position 101, L by C at position 98, H by C at position 97, Q by C at position 94, V by C at position 91, N by C at position 90,
wherein residue 1 corresponds to residue 1 of the mature IFNβ cytokine set forth in SEQ ID NO:196.

311. A modified cytokine of claim 1 that comprises one or more pseudo-wild type mutations.

312. The modified cytokine of claim 311 that is a modified IFNβ.

313. A modified IFNβ cytokine of claim 309 that has increased antiviral activity compared to the unmodified cytokine.

314. The modified IFNβ cytokine of claim 313, wherein antiviral activity is assessed by measuring replication by reverse transcription quantification PCR (RT-qPCR) or CPE (cythopathic effect).

315. A modified IFNα-2b or IFNα-2a cytokine of claim 309 that has more antiviral activity than antiproliferative activity compared to the unmodified cytokine.

316. The cytokine of claim 315, wherein antiproliferative activity is assessed by measuring cell proliferation in the presence of the cytokine.

317. A modified IFNβ cytokine of claim 309 that binds to an IFN receptor, but exhibits when compared to unmodified IFNβ, decreased antiviral activity and decreased antiproliferative activity relative to its receptor binding activity.

318. A modified cytokine of claim 1, comprising two or more mutations.

319. A pharmaceutical composition, comprising a cytokine of claim 1 in a pharmaceutically acceptable carrier.

320. A modified cytokine that exhibits greater resistance to proteolysis compared to the unmodified cytokine, comprising one or more amino acid replacements at one or more target positions on the cytokine corresponding to a structurally-related modified amino acid position within the 3-dimensional structure of the IFNβ modified cytokines of claim 309.

321. A modified cytokine of claim 320, wherein the resistance to proteolysis is measured by mixing it with a protease in vitro, incubation with blood or incubation with serum.

322. A cytokine structural homolog of an IFNβ modified cytokine of claim 309, comprising one or more amino acid replacements in the cytokine structural homolog at positions corresponding to the 3-dimensional-structurally-similar modified positions within the 3-D structure of the modified IFNβ.

323. A cytokine homolog of claim 322, wherein the homolog has increased resistance to proteolysis compared to its unmodified cytokine counterpart, wherein the resistance to proteolysis is measured by mixture with a protease in vitro, incubation with blood, or incubation with serum.

324. A modified IFNβ cytokine, comprising one or more amino acid replacements at one or more target positions in SEQ ID NO. 196 in the IFNβ corresponding to a structurally-related modified amino acid position within the 3-dimensional structure of IFNβ modified cytokines of claim 309, wherein the replacements lead to greater resistance to proteases, as assessed by incubation with a protease or a with a blood lysate or by incubation with serum, compared to the unmodified IFNβ.

325. The modified IFNβ cytokine of claim 309 that has increased stability compared to the unmodified cytokine, wherein stability is assessed by measuring residual biological activity to either inhibit viral replication or to stimulate cell proliferation in appropriate cells, after incubation with either mixtures of proteases, individual proteases, blood lysate or serum.

326. The modified IFNβ cytokine of claim 309 that has decreased stability compared to the unmodified cytokine, wherein stability is assessed by measuring residual biological activity to either inhibit viral replication in the appropriate cells or to stimulate cell proliferation of the appropriate cells, after incubation with either mixtures of proteases, individual proteases, blood lysate or serum.

327. The modified IFNβ cytokine of claim 309 that has increased biological activity compared to the unmodified cytokine, wherein activity is assessed by measuring the capacity to either inhibit viral replication in the appropriate cells or to stimulate cell proliferation of the appropriate cells, after incubation with either mixtures of proteases, individual proteases, blood lysate or serum.

328. A modified of IFNβ cytokine of claim 309, selected from the group consisting of proteins comprising one or more single amino acid replacements in SEQ ID NOS:196, or any combination thereof, corresponding to the replacement of: M by V at position 1, M by I at position 1, M by T at position 1, M by Q at position 1, M by A at position 1, L by V at position 5, L by I at position 5, L by T at position 5, L by Q at position 5, L by H at position 5, L by A at position 5, F by I at position 8, F by V at position 8, L by V at position 9, L by I at position 9, L by T at position 9, L by Q at position 9, L by H at position 9, L by A at position 9, R by H at position 11, R by Q at position 11, F by I at position 15, F by V at position 15, K by Q at position 19, K by T at position 19, K by S at position 19, K by H at position 19, W by S at position 22, W by H at position 22, N by H at position 25, N by S at position 25, N by Q at position 25, R by H position 27, R by Q position 27, L by V at position 28, L by I at position 28, L by T at position 28, L by Q at position 28, L by H at position 28, L by A at position 28, E by Q at position 29, E by H at position 29, Y by H at position 30, Y by I at position 30, L by V at position 32, L by I at position 32, L by T at position 32, L by Q at position 32, L by H at position 32, L by A at position 32, K by Q at position 33, K by T at position 33, K by S at position 33, K by H at position 33, R by H at position 35, R by Q at position 35, M by V at position 36, M by I at position 36, M by T at position 36, M by Q at position 36, M by A at position 36, D by Q at position 39, D by H at position 39, D by G at position 39, E by Q at position 42, E by H at position 42, K by Q at position 45, K by T at position 45, K by S at position 45, K by H at position 45, L by V at position 47, L by I at position 47, L by T at position 47, L by, Q at position 47, L by H at position 47, L by A at position 47, K by Q at position 52, K by T at position 52, K by S at position 52, K by H at position 52, F by I at position 67, F by V at position 67, R by H at position 71, R by Q at position 71, D by Q at position 73, D by H at position 73, D by G at position 73, E by Q at position 81, E by H at position 81, E by Q at position 85, E by H at position 85, Y by H at position 92, Y by I at position 92, K by Q at position 99, K by T at position 99, K by S at position 99, K by H at position 99, E by Q at position 103, E by H at position 103, E by Q at position 104, E by H at position 104, K by Q at position 105, K by T at position 105, K by S at position 105, K by H at position 105, E by Q at position 107, E by H at position 107, K by Q at position 108, K by T at position 108, K by S at position 108, K by H at position 108, E by Q at position 109, E by H at position 109, D by Q at position 110, D by H at position 110, D by G at position 110, F by I at position 111, F by V at position 111, R by H at position 113, R by Q at position 113, L by V at position 116, L by I at position 116, L by T at position 116, L by Q at position 116, L by H at position 116, L by A at position 116, L by V at position 120, L by I at position 120, L by T at position 120, L by Q at position 120, L by H at position 120, L by A at position 120, K by Q at position 123, K by T at position 123, K by S at position 123, K by H at position 123, R by H at position 124, R by Q at position 124, R by H at position 128, R by Q at position 128, L by V at position 130, L by I at position 130, L by T at position 130, L by Q at position 130, L by H at position 130, L by A at position 130, K by Q at position 134, K by T at position 134, K by S at position 134, K by H at position 134, K by Q at position 136, K by T at position 136, K by S at position 136, K by H at position 136, E by Q at position 137, E by H at position 137, Y by H at position 138, Y by I at position 138, R by H at position 152, R by Q at position 152, Y by H at position 155, Y by I at position 155, R by H at position 159, R by Q at position 159, Y by H at position 163, Y by I at position 163, R by H at position 165, R by Q at position 165, M by D at position 1, M by E at position 1, M by K at position 1, M by N at position 1, M by R at position 1, M by S at position 1, L by D at position 5, L by E at position 5, L by K at position 5, L by N at position 5, L by R at position 5, L by S at position 5, L by D at position 6, L by E at position 6, L by K at position 6, L by N at position 6, L by R at position 6, L by S at position 6, L by Q at position 6, L by T at position 6, F by E at position 8, F by K at position 8, F by R at position 8, F by D at position 8, L by D at position 9, L by E at position 9, L by K at position 9, L by N at position 9, L by R at position 9, L by S at position 9, Q by D at position 10, Q by E at position 10, Q by K at position 10, Q by N at position 10, Q by R at position 10, Q by S at position 10, Q by T at position 10, S by D at position 12, S by E at position 12, S by K at position 12, S by R at position 12, S by D at position 13, S by E at position 13, S by K at position 13, S by R at position 13, S by N at position 13, S by Q at position 13, S by T at position 13, N by D at position 14, N by E at position 14, N by K at position 14, N by Q at position 14, N by R at position 14, N by S at position 14, N by T at position 14, F by D at position 15, F by E at position 15, F by K at position 15, F by R at position 15, Q by D at position 16, Q by E at position 16, Q by K at position 16, Q by N at position 16, Q by R at position 16, Q by S at position 16, Q by T at position 16, C by D at position 17, C by E at position 17, C by K at position 17, C by N at position 17, C by Q at position 17, C by R at position 17, C by S at position 17, C by T at position 17, L by N at position 20, L by Q at position 20, L by R at position 20, L by S at position 20, L by T at position 20, L by D at position 20, L by E at position 20, L by K at position 20, W by D at position 22, W by E at position 22, W by K at position 22, W by R at position 22, Q by D at position 23, Q by E at position 23, Q by K at position 23, Q by R at position 23, L by D at position 24, L by E at position 24, L by K at position 24, L by R at position 24, W by D at position 79, W by E at position 79, W by K at position 79, W by R at position 79, N by D at position 80, N by E at position 80, N by K at position 80, N by R at position 80, T by D at position 82, T by E at position 82, T by K at position 82, T by R at position 82, I by D at position 83, I by E at position 83, I by K at position 83, I by R at position 83, I by N at position 83, I by Q at position 83, I by S at position 83, I by T at position 83, N by D at position 86, N by E at position 86, N by K at position 86, N by R at position 86, N by Q at position 86, N by S at position 86, N by T at position 86, L by D at position 87, L by E at position 87, L by K at position 87, L by R at position 87, L by N at position 87, L by Q at position 87, L by S at position 87, L by T at position 87, A by D at position 89, A by E at position 89, A by K at position 89, A by R at position 89, N by D at position 90, N by E at position 90, N by K at position 90, N by Q at position 90, N by R at position 90, N by S at position 90, N by T at position 90, V by D at position 91, V by E at position 91, V by K at position 91, V by N at position 91, V by Q at position 91, V by R at position 91, V by S at position 91, V by T at position 91, Q by D at position 94, Q by E at position 94, Q by Q at position 94, Q by N at position 94, Q by R at position 94, Q by S at position 94, Q by T at position 94, I by D at position 95, I by E at position 95, I by K at position 95, I by N at position 95, I by Q at position 95, I by R at position 95, I by S at position 95, I by T at position 95, H by D at position 97, H by E at position 97, H by K at position 97, H by N at position 97, H by Q at position 97, H by R at position 97, H by S at position 97, H by T at position 97, L by D at position 98, L by E at position 98, L by K at position 98, L by N at position 98, L by Q at position 98, L by R at position 98, L by S at position 98, L by T at position 98, V by D at position 101, V by E at position 101, V by K at position 101, V by N at position 101, V by Q at position 101, V by R at position 101, V by S at position 101, V by T at position 101, M by C at position 1, L by C at position 6, Q by C at position 10, S by C at position 13, Q by C at position 16, L by C at position 17, V by C at position 101, L by C at position 98, H by C at position 97, Q by C at position 94, V by C at position 91, N by C at position 90,
wherein residue 1 corresponds to residue 1 of the mature IFNβ cytokine set forth in SEQ ID NOS:196.

329. A modified IFNβ cytokine of claim 309 selected from the group consisting of proteins comprising one or more single amino acid replacements in SEQ ID NOS:196, or any combination thereof, corresponding to the replacement of: D by Q at position 39, D by H at position 39, D by G at position 39, E by Q at position 42, E by H at position 42, K by Q at position 45, K by T at position 45, K by S at position 45, K by H at position 45, L by V at position 47, L by I at position 47, L by T at position 47, L by Q at position 47, L by H at position 47, L by A at position 47, K by Q at position 52, K by T at position 52, K by S at position 52, K by H at position 52, F by I at position 67, F by V at position 67, R by H at position 71, R by Q at position 71, D by H at position 73, D by G at position 73, D by Q at position 73, E by Q at position 81, E by H at position 81, E by Q at position 107, E by H at position 107, K by Q at position 108, K by T at position 108, K by S at position 108, K by H at position 108, E by Q at position 109, E by H at position 109, D by Q at position 110, D by H at position 110, D by G at position 110, F by I at position 111, F by V at position 111, R by H at position 113, R by Q at position 113, L by V at position 116, L by I at position 116, L by T at position 116, L by Q at position 116, L by H at position 116, L by A at position 116, L by V at position 120, L by I at position 120, L by T at position 120, L by Q at position 120, L by H at position 120, L by A at position 120, K by Q at position 123, K by T at position 123, K by S at position 123, K by H at position 123, R by H at position 124,, R by Q at position 124, R by H at position 128, R by Q at position 128, L by V at position 130, L by I at position 130, L by T at position 130, L by Q at position 130, L by H at position 130, L by A at position 130, K by Q at position 134, K by T at position 134, K by S at position 134, K by H at position 134, K by Q at position 136, K by T at position 136, K by S at position 136, K by H at position 136, E by Q at position 137, E by H at position 137, Y by H at position 163, Y by I at position 1631, R by H at position 165, R by Q at position 165, wherein the first amino acid listed is substituted by the second at the position indicated.

330. A modified IFNβ cytokine of claim 309 selected from the group consisting of proteins comprising one or more single amino acid replacements in SEQ ID NOS: 196, or any combination thereof, corresponding to the replacement of: M by V at position 1, M by I at position 1, M by T at position 1, M by Q at position 1, M by A at position 1, L by V at position 5, L by I at position 5, L by T at position 5, L by Q at position 5, L by H at position 5, L by A at position 5, F by I at position 8, F by V at position 8, L by V at position 9, L by I at position 9, L by T at position 9, L by Q at position 9, L by H at position 9, L by A at position 9, R by H at position 11, R by Q at position 11, F by I at position 15, F by V at position 15, K by Q at position 19, K by T at position 19, K by S at position 19, K by H at position 19, W by S at position 22, W by H at position 22, N by H at position 25, N by S at position 25, N by Q at position 25, R by H position 27, R by Q position 27, L by V at position 28, L by I at position 28, L by T at position 28, L by Q at position 28, L by H at position 28, L by A at position 28, E by Q at position 29, E by H at position 29, Y by H at position 30, Y by I at position 30, L by V at position 32, L by I at position 32, L by T at position 32, L by Q at position 32, L by H at position 32, L by A at position 32, K by Q at position 33, K by T at position 33, K by S at position 33, K by H at position 33, R by H at position 35, R by Q at position 35, M by V at position 36, M by I at position 36, M by T at position 36, M by Q at position 36, M by A at position 36, D by Q at position 39, D by H at position 39, D by G at position 39, E by Q at position 42, E by H at position 42, K by Q at position 45, K by T at position 45, K by S at position 45, K by H at position 45, L by V at position 47, L by I at position 47, L by T at position 47, L by, Q at position 47, L by H at position 47, L by A at position 47, K by Q at position 52, K by T at position 52, K by S at position 52, K by H at position 52, F by I at position 67, F by V at position 67, R by H at position 71, R by Q at position 71, D by Q at position 73, D by H at position 73, D by G at position 73, E by Q at position 81, E by H at position 81, E by Q at position 85, E by H at position 85, Y by H at position 92, Y by I at position 92, K by 0 at position 99, K by T at position 99, K by S at position 99, K by H at position 99, E by Q at position 103, E by H at position 103, E by Q at position 104, E by H at position 104, K by Q at position 105, K by T at position 105, K by S at position 105, K by H at position 105, E by Q at position 107, E by H at position 107, K by Q at position 108, K by T at position 108, K by S at position 108, K by H at position 108, E by Q at position 109, E by H at position 109, D by Q at position 110, D by H at position 110, D by G at position 110, F by I at position 111, F by V at position 111, R by H at position 113, R by Q at position 113, L by V at position 116, L by I at position 116, L by T at position 116, L by Q at position 116, L by H at position 116, L by A at position 116, L by V at position 120, L by I at position 120, L by T at position 120, L by Q at position 120, L by H at position 120, L by A at position 120, K by Q at position 123, K by T at position 123, K by S at position 123, K by H at position 123, R by H at position 124, R by Q at position 124, R by H at position 128, R by Q at position 128, L by V at position 130, L by I at position 130, L by T at position 130, L by Q at position 130, L by H at position 130, L by A at position 130, K by Q at position 134, K by T at position 134, K by S at position 134, K by H at position 134, K by Q at position 136, K by T at position 136, K by S at position 136, K by H at position 136, E by Q at position 137, E by H at position 137, Y by H at position 138, Y by I at position 138, R by H at position 152, R by Q at position 152, Y by H at position 155, Y by I at position 155, R by H at position 159, R by Q at position 159, Y by H at position 163, Y by I at position 163, R by H at position 165, R by Q at position 165, M by D at position 1, M by E at position 1, M by K at position 1, M by N at position 1, M by R at position 1, M by S at position 1, L by D at position 5, L by E at position 5, L by K at position 5, L by N at position 5, L by R at position 5, L by S at position 5, L by D at position 6, L by E at position 6, L by K at position 6, L by N at position 6, L by R at position 6, L by S at position 6, L by Q at position 6, L by T at position 6, F by E at position 8, F by K at position 8, F by R at position 8, F by D at position 8, L by D at position 9, L by E at position 9, L by K at position 9, L by N at position 9, L by R at position 9, L by S at position 9, Q by D at position 10, Q by E at position 10, Q by K at position 10, Q by N at position 10, Q by R at position 10, Q by S at position 10, Q by T at position 10, S by D at position 12, S by E at position 12, S by K at position 12, S by R at position 12, S by D at position 13, S by E at position 13, S by K at position 13, S by R at position 13, S by N at position 13, S by Q at position 13, S by T at position 13, N by D at position 14, N by E at position 14, N by K at position 14, N by Q at position 14, N by R at position 14, N by S at position 14, N by T at position 14, F by D at position 15, F by E at position 15, F by K at position 15, F by R at position 15, Q by D at position 16, Q by E at position 16, Q by K at position 16, Q by N at position 16, Q by R at position 16, Q by S at position 16, Q by T at position 16, C by D at position 17, C by E at position 17, C by K at position 17, C by N at position 17, C by Q at position 17, C by R at position 17, C by S at position 17, C by T at position 17, L by N at position 20, L by Q at position 20, L by R at position 20, L by S at position 20, L by T at position 20, L by D at position 20, L by E at position 20, L by K at position 20, W by D at position 22, W by E at position 22, W by K at position 22, W by R at position 22, Q by D at position 23, Q by E at position 23, Q by K at position 23, Q by R at position 23, L by D at position 24, L by E at position 24, L by K at position 24, L by R at position 24, W by D at position 79, W by E at position 79, W by K at position 79, W by R at position 79, N by D at position 80, N by E at position 80, N by K at position 80, N by R at position 80, T by D at position 82, T by E at position 82, T by K at position 82, T by R at position 82, I by D at position 83, I by E at position 83, I by K at position 83, I by R at position 83, I by N at position 83, I by Q at position 83, I by S at position 83, I by T at position 83, N by D at position 86, N by E at position 86, N by K at position 86, N by R at position 86, N by Q at position 86, N by S at position 86, N by T at position 86, L by D at position 87, L by E at position 87, L by K at position 87, L by R at position 87, L by N at position 87, L by Q at position 87, L by S at position 87, L by T at position 87, A by D at position 89, A by E at position 89, A by K at position 89, A by R at position 89, N by D at position 90, N by E at position 90, N by K at position 90, N by Q at position 90, N by R at position 90, N by S at position 90, N by T at position 90, V by D at position 91, V by E at position 91, V by K at position 91, V by N at position 91, V by Q at position 91, V by R at position 91, V by S at position 91, V by T at position 91, Q by D at position 94, Q by E at position 94, Q by Q at position 94, Q by N at position 94, Q by R at position 94, Q by S at position 94, Q by T at position 94, I by D at position 95, I by E at position 95, I by K at position 95, 1by N at position 95, I by Q at position 95, I by R at position 95, I by S at position 95, I by T at position 95, H by D at position 97, H by E at position 97, H by K at position 97, H by N at position 97, H by Q at position 97, H by R at position 97, H by S at position 97, H by T at position 97, L by D at position 98, L by E at position 98, L by K at position 98, L by N at position 98, L by Q at position 98, L by R at position 98, L by S at position 98, L by T at position 98, V by D at position 101, V by E at position 101, V by K at position 101, V by N at position 101, V by Q at position 101, V by R at position 101, V by S at position 101, V by T at position 101, M by C at position 1, L by C at position 6, Q by C at position 10, S by C at position 13, Q by C at position 16, L by C at position 17, V by C at position 101, L by C at position 98, H by C at position 97, Q by C at position 94, V by C at position 91, N by C at position 90, D by Q at position 39, D by H at position 39, D by G at position 39, E by Q at position 42, E by H at position 42, K by Q at position 45, K by T at position 45, K by S at position 45, K by H at position 45, L by V at position 47, L by I at position 47, L by T at position 47, L by Q at position 47, L by H at position 47, L by A at position 47, K by Q at position 52, K by T at position 52, K by S at position 52, K by H at position 52, F by I at position 67, F by V at position 67, R by H at position 71, R by Q at position 71, D by H at position 73, D by G at position 73, D by Q at position 73, E by Q at position 81, E by H at position 81, E by Q at position 107, E by H at position 107, K by Q at position 108, K by T at position 108, K by S at position 108, K by H at position 108, E by Q at position 109, E by H at position 109, D by Q at position 110, D by H at position 110, D by G at position 110, F by I at position 111, F by V at position 111, R by H at position 113, R by Q at position 113, L by V at position 116, L by I at position 116, L by T at position 116, L by Q at position 116, L by H at position 116, L by A at position 116, L by V at position 120, L by I at position 120, L by T at position 120, L by Q at position 120, L by H at position 120, L by A at position 120, K by Q at position 123, K by T at position 123, K by S at position 123, K by H at position 123, R by H at position 124, R by Q at position 124, R by H at position 128, R by Q at position 128, L by V at position 130, L by I at position 130, L by T at position 130, L by Q at position 130, L by H at position 130, L by A at position 130, K by Q at position 134, K by T at position 134, K by S at position 134, K by H at position 134, K by Q at position 136, K by T at position 136, K by S at position 136,, K by H at position 136, E by Q at position 137, E by H at position 137, Y by H at position 163, Y by I at position 1631, R by H at position 165, R by Q at position 165, wherein the first amino acid listed is substituted by the second at the position indicated.

331. A modified IFNβ of claim 330 selected from the group consisting of a modified IFNβ set forth in any of SEQ ID Nos.234-289, 989-1302.
